(19) United States
(12) Patent Application Publication
(10) Pub. No.: US 2002/0172952 A1
(43) Pub. Date: Nov. 21, 2002

(54) Compositions and methods for the therapy and diagnosis of lung cancer

(75) Inventors: Robert A. Henderson, Edmonds, WA (US); Tongtong Wang, Medina, WA (US); Yoshihiro Watanabe, Mercer Island, WA (US); Jeffrey C. Johnson, Des Moines, WA (US); Marc W. Retter, Carnation, WA (US); Margarita Durham, Seattle, WA (US); Darrick Carter, Seattle, WA (US); Gary R. Fanger, Mill Creek, WA (US); Thomas S. Vedvick, Federal Way, WA (US); Chaitanya S. Bangur, Seattle, WA (US); Andria McNabb, Renton, WA (US)

Correspondence Address: SEED INTELLECTUAL PROPERTY LAW GROUP PLLC, 701 FIFTH AVE, SUITE 6300, SEATTLE, WA, 98104-7092, US

(73) Assignee: Corixa Corporation, Seattle, WA (US)

(21) Appl. No.: 09/902,941

(22) Filed: Jul. 10, 2001

Related U.S. Application Data
(63) Continuation-in-part of application No. 09/849,626, filed on May 3, 2001.
Application No. 09/849,626 is a continuation-in-part of application No. 09/736,457, filed on Dec. 13, 2000.
Application No. 09/736,457 is a continuation-in-part of application No. 09/702,705, filed on Oct. 30, 2000.
Application No. 09/702,705 is a continuation-in-part of application No. 09/677,419, filed on Oct. 6, 2000.
Application No. 09/677,419 is a continuation-in-part of application No. 09/671,325, filed on Sep. 26, 2000.
Application No. 09/671,325 is a continuation-in-part of application No. 09/658,824, filed on Sep. 8, 2000.
Application No. 09/658,824 is a continuation-in-part of application No. 09/651,563, filed on Aug. 29, 2000.
Application No. 09/651,563 is a continuation-in-part of application No. 09/614,124, filed on Jul. 11, 2000.
Application No. 09/614,124 is a continuation-in-part of application No. 09/589,184, filed on Jun. 5, 2000.
Application No. 09/589,184 is a continuation-in-part of application No. 09/560,406, filed on Apr. 27, 2000.
Application No. 09/560,406 is a continuation-in-part of application No. 09/546,259, filed on Apr. 10, 2000.
Application No. 09/546,259 is a continuation-in-part of application No. 09/533,077, filed on Mar. 22, 2000.
Application No. 09/533,077 is a continuation-in-part of application No. 09/519,642, filed on Mar. 6, 2000.
Application No. 09/519,642 is a continuation-in-part of application No. 09/476,300, filed on Dec. 30, 1999.
Application No. 09/476,300 is a continuation-in-part of application No. 09/466,867, filed on Dec. 17, 1999.
Application No. 09/466,867 is a continuation-in-part of application No. 09/419,356, filed on Oct. 15, 1999.
Application No. 09/419,356 is a continuation-in-part of application No. 09/346,492, filed on Jun. 30, 1999.

(51) Int. Cl. C12Q 1/68; G01N 33/574; C07H 21/04; C12N 9/00; C12P 21/02; C12N 5/06

(52) U.S. Cl. 435/6; 435/7.23; 435/69.1; 435/183; 435/320.1; 435/325; 536/23.2

(57) ABSTRACT

Compositions and methods for the therapy and diagnosis of cancer, particularly lung cancer, are disclosed. Illustrative compositions comprise one or more lung tumor polypeptides, immunogenic portions thereof, polynucleotides that encode such polypeptides, antigen presenting cell that expresses such polypeptides, and T cells that are specific for cells expressing such polypeptides. The disclosed compositions are useful, for example, in the diagnosis, prevention and/or treatment of diseases, particularly lung cancer.

### TECHNICAL FIELD OF THE INVENTION

[0001] The present invention relates generally to therapy and diagnosis of cancer, such as lung cancer. The invention is more specifically related to polypeptides, comprising at least a portion of a lung tumor protein, and to polynucleotides encoding such polypeptides. Such polypeptides and polynucleotides are useful in pharmaceutical compositions, e.g., vaccines, and other compositions for the diagnosis and treatment of lung cancer.

### BACKGROUND OF THE INVENTION

[0002] Cancer is a significant health problem throughout the world. Although advances have been made in detection and therapy of cancer, no vaccine or other universally successful method for prevention or treatment is currently available. Current therapies, which are generally based on a combination of chemotherapy or surgery and radiation, continue to prove inadequate in many patients.

[0003] Lung cancer is the primary cause of cancer death among both men and women in the U.S., with an estimated 172,000 new cases being reported in 1994. The five-year survival rate among all lung cancer patients, regardless of the stage of disease at diagnosis, is only 13%. This contrasts with a five-year survival rate of 46% among cases detected while the disease is still localized. However, only 16% of lung cancers are discovered before the disease has spread.

[0004] Early detection is difficult since clinical symptoms are often not seen until the disease has reached an advanced stage. Currently, diagnosis is aided by the use of chest x-rays, analysis of the type of cells contained in sputum and fiberoptic examination of the bronchial passages. Treatment regimens are determined by the type and stage of the cancer, and include surgery, radiation therapy and/or chemotherapy.

[0005] In spite of considerable research into therapies for this and other cancers, lung cancer remains difficult to diagnose and treat effectively. Accordingly, there is a need in the art for improved methods for detecting and treating such cancers. The present invention fulfills these needs and further provides other related advantages.

### SUMMARY OF THE INVENTION

[0006] In one aspect, the present invention provides polynucleotide compositions comprising a sequence selected from the group consisting of:

[0007] (a) sequences provided in SEQ ID NOs: 1-57, 59-323, 341-782, 784-785, 788, 790, 792, 794, 796, 800-804, 807, 808, 810-826, 828-1664, 1668, 1669, 1676, 1680-1805, 1824, 1826-1829, 1865-1868, 1873, 1875, 1877, 1879, 1881, 1883, 1891-1900, 1910, 1914, 1918, 1922-1924, 1931, 1933, 1938, 1941 and 1974-2002;

[0008] (b) complements of the sequences provided in SEQ ID NOs: 1-57, 59-323, 341-782, 784-785, 788, 790, 792, 794, 796, 800-804, 807, 808, 810-826, 828-1664, 1668, 1669, 1676, 1680-1805, 1824, 1826-1829, 1865-1868, 1873, 1875, 1877, 1879, 1881, 1883, 1891-1900, 1910, 1914, 1918, 1922-1924, 1931, 1933, 1938, 1941 and 1974-2002;

[0009] (c) sequences consisting of at least 20, 25, 30, 35, 40, 45, 50, 75 and 100 contiguous residues of a sequence provided in SEQ ID NOs: 1-57, 59-323, 341-782, 784-785, 788, 790, 792, 794, 796, 800-804, 807, 808, 810-826, 828-1664, 1668, 1669, 1676, 1680-1805, 1824, 1826-1829, 1865-1868, 1873, 1875, 1877, 1879, 1881, 1883, 1891-1900, 1910, 1914, 1918, 1922-1924, 1931, 1933, 1938, 1941 and 1974-2002;

[0010] (d) sequences that hybridize to a sequence provided in SEQ ID NOs: 1-57, 59-323, 341-782, 784-785, 788, 790, 792, 794, 796, 800-804, 807, 808, 810-826, 828-1664, 1668, 1669, 1676, 1680-1805, 1824, 1826-1829, 1865-1868, 1873, 1875, 1877, 1879, 1881, 1883, 1891-1900, 1910, 1914, 1918, 1922-1924, 1931, 1933, 1938, 1941 and 1974-2002, under moderate or highly stringent conditions;

[0011] (e) sequences having at least 75%, 80%, 85%, 90%, 95%, 96%, 97%, 98% or 99% identity to a sequence of SEQ ID NOs: 1-57, 59-323, 341-782, 784-785, 788, 790, 792, 794, 796, 800-804, 807, 808, 810-826, 828-1664, 1668, 1669, 1676, 1680-1805, 1824, 1826-1829, 1865-1868, 1873, 1875, 1877, 1879, 1881, 1883, 1891-1900, 1910, 1914, 1918, 1922-1924, 1931, 1933, 1938, 1941 and 1974-2002;

[0012] (f) degenerate variants of a sequence provided in SEQ ID NOs: 1-57, 59-323, 341-782, 784-785, 788, 790, 792, 794, 796, 800-804, 807, 808, 810-826, 828-1664, 1668, 1669, 1676, 1680-1805, 1824, 1826-1829, 1865-1868, 1873, 1875, 1877, 1879, 1881, 1883, 1891-1900, 1910, 1914, 1918, 1922-1924, 1931, 1933, 1938, 1941 and 1974-2002.

[0013] In one preferred embodiment, the polynucleotide compositions of the invention are expressed in at least about 20%, more preferably in at least about 30%, and most preferably in at least about 50% of lung tumors samples tested, at a level that is at least about 2-fold, preferably at least about 5-fold, and most preferably at least about 10-fold higher than that for normal tissues.

[0014] The present invention, in another aspect, provides polypeptide compositions comprising an amino acid sequence that is encoded by a polynucleotide sequence described above.

[0015] The present invention further provides polypeptide compositions comprising an amino acid sequence selected from the group consisting of sequences recited in SEQ ID NOs: 324-340, 783, 786, 787, 789, 791, 793, 795, 797-799, 805, 806, 809, 827, 1667, 1670-1675, 1677-1679, 1806-1822, 1825, 1830-1833, 1834-1856, 1863, 1864, 1869-1872, 1874, 1876, 1878, 1880, 1882, 1884-1890, 1901-1909, 1913, 1917, 1921, 1925-1930, 1932, 1934, 1937, 1940 and 1942-1973.

[0016] In certain preferred embodiments, the polypeptides and/or polynucleotides of the present invention are immunogenic, i.e., they are capable of eliciting an immune response, particularly a humoral and/or cellular immune response, as further described herein.

[0017] The present invention further provides fragments, variants and/or derivatives of the disclosed polypeptide and/or polynucleotide sequences. wherein the fragments, variants and/or derivatives preferably have a level of immunogenic activity of at least about 50%, preferably at least about 70% and more preferably at least about 90% of the level of immunogenic activity of a polypeptide sequence set forth in SEQ ID NOs: 324-340, 783, 786, 787, 789, 791, 793, 795, 797-799, 805, 806, 809, 827, 1667, 1670-1675, 1677-1679, 1806-1822, 1825, 1830-1833, 1834-1856, 1863, 1864, 1869-1872, 1874, 1876, 1878, 1880, 1882, 1884-1890, 1901-1909, 1913, 1917, 1921, 1925-1930, 1932, 1934, 1937, 1940 and 1942-1973 or a polypeptide sequence encoded by a polynucleotide sequence set forth in SEQ ID NOs: 1-57, 59-323, 341-782, 784-785, 788, 790, 792, 794, 796, 800-804, 807, 808, 810-826, 828-1664, 1668, 1669, 1676, 1680-1805, 1824, 1826-1829, 1865-1868, 1873, 1875, 1877, 1879, 1881, 1883, 1891-1900, 1910, 1914, 1918, 1922-1924, 1931, 1933, 1938, 1941 and 1974-2002.

[0018] The present invention further provides polynucleotides that encode a polypeptide described above, expression vectors comprising such polynucleotides and host cells transformed or transfected with such expression vectors.

[0019] Within other aspects, the present invention provides pharmaceutical compositions comprising a polypeptide or polynucleotide as described above and a physiologically acceptable carrier.

[0020] Within a related aspect of the present invention, the pharmaceutical compositions, e.g., vaccine compositions, are provided for prophylactic or therapeutic applications. Such compositions generally comprise an immunogenic polypeptide or polynucleotide of the invention and an immunostimulant, such as an adjuvant.

[0021] The present invention further provides pharmaceutical compositions that comprise: (a) an antibody or antigen-binding fragment thereof that specifically binds to a polypeptide of the present invention, or a fragment thereof, and (b) a physiologically acceptable carrier.

[0022] Within further aspects, the present invention provides pharmaceutical compositions comprising: (a) an antigen presenting cell that expresses a polypeptide as described above and (b) a pharmaceutically acceptable carrier or excipient. Illustrative antigen presenting cells include dendritic cells, macrophages, monocytes, fibroblasts and B cells.

[0023] Within related aspects, pharmaceutical compositions are provided that comprise: (a) an antigen presenting cell that expresses a polypeptide as described above and (b) an immunostimulant.

[0024] The present invention further provides, in other aspects, fusion proteins that comprise at least one polypeptide as described above, as well as polynucleotides encoding such fusion proteins, typically in the form of pharmaceutical compositions, e.g., vaccine compositions, comprising a physiologically acceptable carrier and/or an immunostimulant. The fusions proteins may comprise multiple immunogenic polypeptides or portions/variants thereof, as described herein, and may further comprise one or more polypeptide segments for facilitating the expression, purification and/or immunogenicity of the polypeptide(s).

[0025] Within further aspects, the present invention provides methods for stimulating an immune response in a patient, preferably a T cell response in a human patient, comprising administering a pharmaceutical composition described herein. The patient may be afflicted with lung cancer, in which case the methods provide treatment for the disease, or patient considered at risk for such a disease may be treated prophylactically.

[0026] Within further aspects, the present invention provides methods for inhibiting the development of a cancer in a patient, comprising administering to a patient a pharmaceutical composition as recited above. The patient may be afflicted with lung cancer, in which case the methods provide treatment for the disease, or patient considered at risk for such a disease may be treated prophylactically.

[0027] The present invention further provides, within other aspects, methods for removing tumor cells from a biological sample, comprising contacting a biological sample with T cells that specifically react with a polypeptide of the present invention, wherein the step of contacting is performed under conditions and for a time sufficient to permit the removal of cells expressing the protein from the sample.

[0028] Within related aspects, methods are provided for inhibiting the development of a cancer in a patient, comprising administering to a patient a biological sample treated as described above.

[0029] Methods are further provided, within other aspects, for stimulating and/or expanding T cells specific for a polypeptide of the present invention, comprising contacting T cells with one or more of: (i) a polypeptide as described above; (ii) a polynucleotide encoding such a polypeptide; and/or (iii) an antigen presenting cell that expresses such a polypeptide; under conditions and for a time sufficient to permit the stimulation and/or expansion of T cells. Isolated T cell populations comprising T cells prepared as described above are also provided.

[0030] Within further aspects, the present invention provides methods for inhibiting the development of a cancer in a patient, comprising administering to a patient an effective amount of a T cell population as described above.

[0031] The present invention further provides methods for inhibiting the development of a cancer in a patient, comprising the steps of: (a) incubating CD4⁺ and/or CD8⁺T cells isolated from a patient with one or more of: (i) a polypeptide comprising at least an immunogenic portion of polypeptide disclosed herein; (ii) a polynucleotide encoding such a polypeptide; and (iii) an antigen-presenting cell that expressed such a polypeptide; and (b) administering to the patient an effective amount of the proliferated T cells, and thereby inhibiting the development of a cancer in the patient. Proliferated cells may, but need not, be cloned prior to administration to the patient.

[0032] Within further aspects, the present invention provides methods for determining the presence or absence of a cancer, preferably a lung cancer, in a patient comprising: (a) contacting a biological sample obtained from a patient with a binding agent that binds to a polypeptide as recited above; (b) detecting in the sample an amount of polypeptide that binds to the binding agent; and (c) comparing the amount of polypeptide with a predetermined cut-off value, and therefrom determining the presence or absence of a cancer in the patient. Within preferred embodiments, the binding agent is an antibody, more preferably a monoclonal antibody.

[0033] The present invention also provides, within other aspects, methods for monitoring the progression of a cancer in a patient. Such methods comprise the steps of: (a) contacting a biological sample obtained from a patient at a first point in time with a binding agent that binds to a polypeptide as recited above; (b) detecting in the sample an amount of polypeptide that binds to the binding agent; (c) repeating steps (a) and (b) using a biological sample obtained from the patient at a subsequent point in time; and (d) comparing the amount of polypeptide detected in step (c) with the amount detected in step (b) and therefrom monitoring the progression of the cancer in the patient.

[0034] The present invention further provides, within other aspects, methods for determining the presence or absence of a cancer in a patient, comprising the steps of: (a) contacting a biological sample obtained from a patient with an oligonucleotide that hybridizes to a polynucleotide that encodes a polypeptide of the present invention; (b) detecting in the sample a level of a polynucleotide, preferably mRNA, that hybridizes to the oligonucleotide; and (c) comparing the level of polynucleotide that hybridizes to the oligonucleotide with a predetermined cut-off value, and therefrom determining the presence or absence of a cancer in the patient. Within certain embodiments, the amount of mRNA is detected via polymerase chain reaction using, for example, at least one oligonucleotide primer that hybridizes to a polynucleotide encoding a polypeptide as recited above, or a complement of such a polynucleotide. Within other embodiments, the amount of mRNA is detected using a hybridization technique, employing an oligonucleotide probe that hybridizes to a polynucleotide that encodes a polypeptide as recited above, or a complement of such a polynucleotide.

[0035] In related aspects, methods are provided for monitoring the progression of a cancer in a patient, comprising the steps of: (a) contacting a biological sample obtained from a patient with an oligonucleotide that hybridizes to a polynucleotide that encodes a polypeptide of the present invention; (b) detecting in the sample an amount of a polynucleotide that hybridizes to the oligonucleotide; (c) repeating steps (a) and (b) using a biological sample obtained from the patient at a subsequent point in time; and (d) comparing the amount of polynucleotide detected in step (c) with the amount detected in step (b) and therefrom monitoring the progression of the cancer in the patient.

[0036] Within further aspects, the present invention provides antibodies, such as monoclonal antibodies, that bind to a polypeptide as described above, as well as diagnostic kits comprising such antibodies. Diagnostic kits comprising one or more oligonucleotide probes or primers as described above are also provided.

[0037] These and other aspects of the present invention will become apparent upon reference to the following detailed description. All references disclosed herein are hereby incorporated by reference in their entirety as if each was incorporated individually.

### SEQUENCE IDENTIFIERS

[0038] SEQ ID NO: 1 is the determined cDNA sequence for clone #19038, also referred to as L845P.

[0039] SEQ ID NO: 2 is the determined cDNA sequence for clone #19036.

[0040] SEQ ID NO: 3 is the determined cDNA sequence for clone #19034.

[0041] SEQ ID NO: 4 is the determined cDNA sequence for clone #19033.

[0042] SEQ ID NO: 5 is the determined cDNA sequence for clone #19032.

[0043] SEQ ID NO: 6 is the determined cDNA sequence for clone #19030, also referred to as L559S.

[0044] SEQ ID NO: 7 is the determined cDNA sequence for clone #19029.

[0045] SEQ ID NO: 8 is the determined cDNA sequence for clone #19025.

[0046] SEQ ID NO: 9 is the determined cDNA sequence for clone #19023.

[0047] SEQ ID NO: 10 is the determined cDNA sequence for clone #18929.

[0048] SEQ ID NO: 11 is the determined cDNA sequence for clone #19010.

[0049] SEQ ID NO: 12 is the determined cDNA sequence for clone #19009.

[0050] SEQ ID NO: 13 is the determined cDNA sequence for clones #19005, 19007, 19016 and 19017.

[0051] SEQ ID NO: 14 is the determined cDNA sequence for clone #19004.

[0052] SEQ ID NO: 15 is the determined cDNA sequence for clones #19002 and 18965.

[0053] SEQ ID NO: 16 is the determined cDNA sequence for clone #18998.

[0054] SEQ ID NO: 17 is the determined cDNA sequence for clone #18997.

[0055] SEQ ID NO: 18 is the determined cDNA sequence for clone #18996.

[0056] SEQ ID NO: 19 is the determined cDNA sequence for clone #18995.

[0057] SEQ ID NO: 20 is the determined cDNA sequence for clone #18994, also known as L846P.

[0058] SEQ ID NO: 21 is the determined cDNA sequence for clone #18992.

[0059] SEQ ID NO: 22 is the determined cDNA sequence for clone #18991.

[0060] SEQ ID NO: 23 is the determined cDNA sequence for clone #18990, also referred to as clone #20111.

[0061] SEQ ID NO: 24 is the determined cDNA sequence for clone #18987.

[0062] SEQ ID NO: 25 is the determined cDNA sequence for clone #18985, also referred as L839P.

[0063] SEQ ID NO: 26 is the determined cDNA sequence for clone #18984, also referred to as L847P.

[0064] SEQ ID NO: 27 is the determined cDNA sequence for clone 18983.

[0065] SEQ ID NO: 28 is the determined cDNA sequence for clones #18976 and 18980.

[0066] SEQ ID NO: 29 is the determined cDNA sequence for clone #18975.

[0067] SEQ ID NO: 30 is the determined cDNA sequence for clone #18974.

[0068] SEQ ID NO: 31 is the determined cDNA sequence for clone #18973.

[0069] SEQ ID NO: 32 is the determined cDNA sequence for clone #18972.

[0070] SEQ ID NO: 33 is the determined cDNA sequence for clone #18971, also referred to as L801 P.

[0071] SEQ ID NO: 34 is the determnined cDNA sequence for clone #18970.

[0072] SEQ ID NO: 35 is the determined cDNA sequence for clone #18966.

[0073] SEQ ID NO: 36 is the determnined cDNA sequence for clones #18964, 18968 and 19039.

[0074] SEQ ID NO: 37 is the determined cDNA sequence for clone #18960.

[0075] SEQ ID NO: 38 is the determined cDNA sequence for clone #18959.

[0076] SEQ ID NO: 39 is the determined cDNA sequence for clones #18958 and 18982.

[0077] SEQ ID NO: 40 is the determined cDNA sequence for clones #18956 and 19015.

[0078] SEQ ID NO: 41 is the determined cDNA sequence for clone #18954, also referred to L848P.

[0079] SEQ ID NO: 42 is the determined cDNA sequence for clone #18951.

[0080] SEQ ID NO: 43 is the determined cDNA sequence for clone #18950.

[0081] SEQ ID NO: 44 is the determined cDNA sequence for clones #18949 and 19024, also referred to as L844P.

[0082] SEQ ID NO: 45 is the determined cDNA sequence for clone #18948.

[0083] SEQ ID NO: 46 is the determined cDNA sequence for clone #18947, also referred to as L840P.

[0084] SEQ ID NO: 47 is the determined cDNA sequence for clones #18946, 18953, 18969 and 19027.

[0085] SEQ ID NO: 48 is the determined cDNA sequence for clone #18942.

[0086] SEQ ID NO: 49 is the determined cDNA sequence for clone #18940, 18962, 18963, 19006, 19008, 19000, and 19031.

[0087] SEQ ID NO: 50 is the determined cDNA sequence for clone 18939.

[0088] SEQ ID NO: 51 is the determined cDNA sequence for clones #18938 and 18952.

[0089] SEQ ID NO: 52 is the determined cDNA sequence for clone #18938.

[0090] SEQ ID NO: 53 is the determined cDNA sequence for clone #18937.

[0091] SEQ ID NO: 54 is the determined cDNA sequence for clones #18934, 18935, 18993 and 19022, also referred to as L548S.

[0092] SEQ ID NO: 55 is the determined cDNA sequence for clone #18932.

[0093] SEQ ID NO: 56 is the deter2ined cDNA sequence for clones #18931 and 18936.

[0094] SEQ ID NO: 57 is the determined cDNA sequence for clone #18930.

[0095] SEQ ID NO: 58 is the determined cDNA sequence for clone #19014 (this sequence has homology to clone L773P, which is also described in co-pending U.S. application Ser. No. 09/285,479, filed Apr. 2, 1999).

[0096] SEQ ID NO: 59 is the determined cDNA sequence for clone #19127.

[0097] SEQ ID NO: 60 is the determined cDNA sequence for clones #19057 and 19064.

[0098] SEQ ID NO: 61 is the determined cDNA sequence for clone #19122.

[0099] SEQ ID NO: 62 is the determined cDNA sequence for clones #19120 and 18121.

[0100] SEQ ID NO: 63 is the determined cDNA sequence for clone #19118.

[0101] SEQ ID NO: 64 is the determined cDNA sequence for clone #19117.

[0102] SEQ ID NO: 65 is the determined cDNA sequence for clone #19116.

[0103] SEQ ID NO: 66 is the determined cDNA sequence for clone #19114.

[0104] SEQ ID NO: 67 is the determined cDNA sequence for clone #19112, also known as L561S.

[0105] SEQ ID NO: 68 is the determined cDNA sequence for clone #19110.

[0106] SEQ ID NO: 69 is the determined cDNA sequence for clone #19107, also referred to as L552S.

[0107] SEQ ID NO: 70 is the determined cDNA sequence for clone #19106, also referred to as L547S.

[0108] SEQ ID NO: 71 is the determined cDNA sequence for clones #19105 and 19111.

[0109] SEQ ID NO: 72 is the determined cDNA sequence for clone #19099.

[0110] SEQ ID NO: 73 is the determined cDNA sequence for clones #19095, 19104 and 19125, also referred to as L549S.

[0111] SEQ ID NO: 74 is the determined cDNA sequence for clone #19094.

[0112] SEQ ID NO: 75 is the determined cDNA sequence for clones #19089 and 19101.

[0113] SEQ ID NO: 76 is the determined cDNA sequence for clone #19088.

[0114] SEQ ID NO: 77 is the determined cDNA sequence for clones #19087, 19092, 19096, 19100 and 19119.

[0115] SEQ ID NO: 78 is the determined cDNA sequence for clone #19086.

[0116] SEQ ID NO: 79 is the determined cDNA sequence for clone #19085, also referred to as L550S.

[0117] SEQ ID NO: 80 is the determined cDNA sequence for clone #19084, also referred to as clone #19079.

[0118] SEQ ID NO: 81 is the determined cDNA sequence for clone #19082.

[0119] SEQ ID NO: 82 is the determined cDNA sequence for clone #19080.

[0120] SEQ ID NO: 83 is the determined cDNA sequence for clone #19077.

[0121] SEQ ID NO: 84 is the determined cDNA sequence for clone #19076, also referred to as L551S.

[0122] SEQ ID NO: 85 is the determined cDNA sequence for clone #19074, also referred to as clone #20102.

[0123] SEQ ID NO: 86 is the determined cDNA sequence for clone #19073, also referred to as L560S.

[0124] SEQ ID NO: 87 is the determined cDNA sequence for clones #19072 and 19115.

[0125] SEQ ID NO: 88 is the determined cDNA sequence for clone #19071.

[0126] SEQ ID NO: 89 is the determined cDNA sequence for clone #19070.

[0127] SEQ ID NO: 90 is the determined cDNA sequence for clone #19069.

[0128] SEQ ID NO: 91 is the determined cDNA sequence for clone #19068, also referred to L563S.

[0129] SEQ ID NO: 92 is the determined cDNA sequence for clone #19066.

[0130] SEQ ID NO: 93 is the determined cDNA sequence for clone #19065.

[0131] SEQ ID NO: 94 is the determined cDNA sequence for clone #19063.

[0132] SEQ ID NO: 95 is the determined cDNA sequence for clones #19061, 19081, 19108 and 19109.

[0133] SEQ ID NO: 96 is the determined cDNA sequence for clones #19060, 19067 and 19083, also referred to as L548S.

[0134] SEQ ID NO: 97 is the determined cDNA sequence for clones #19059 and 19062.

[0135] SEQ ID NO: 98 is the determined cDNA sequence for clone #19058.

[0136] SEQ ID NO: 99 is the determined cDNA sequence for clone #19124.

[0137] SEQ ID NO: 100 is the determined cDNA sequence for clone #18929.

[0138] SEQ ID NO: 101 is the determined cDNA sequence for clone #18422.

[0139] SEQ ID NO: 102 is the determined cDNA sequence for clone #18425.

[0140] SEQ ID NO: 103 is the determined cDNA sequence for clone #18431.

[0141] SEQ ID NO: 104 is the determined cDNA sequence for clone #18433.

[0142] SEQ ID NO: 105 is the determined cDNA sequence for clone #18444.

[0143] SEQ ID NO: 106 is the determined cDNA sequence for clone #18449.

[0144] SEQ ID NO: 107 is the determined cDNA sequence for clone #18451.

[0145] SEQ ID NO: 108 is the determined cDNA sequence for clone #18452.

[0146] SEQ ID NO: 109 is the determined cDNA sequence for clone #18455.

[0147] SEQ ID NO: 110 is the determined cDNA sequence for clone #18457.

[0148] SEQ ID NO: 111 is the determined cDNA sequence for clone #18466.

[0149] SEQ ID NO: 112 is the determined cDNA sequence for clone #18468.

[0150] SEQ ID NO: 113 is the determined cDNA sequence for clone #18471.

[0151] SEQ ID NO: 114 is the determined cDNA sequence for clone #18475.

[0152] SEQ ID NO: 115 is the determined cDNA sequence for clone #18476.

[0153] SEQ ID NO: 116 is the determined cDNA sequence for clone #18477.

[0154] SEQ ID NO: 117 is the determined cDNA sequence for clone #20631.

[0155] SEQ ID NO: 118 is the determined cDNA sequence for clone #20634.

[0156] SEQ ID NO: 119 is the determined cDNA sequence for clone #20635.

[0157] SEQ ID NO: 120 is the determined cDNA sequence for clone #20637.

[0158] SEQ ID NO: 121 is the determined cDNA sequence for clone #20638.

[0159] SEQ ID NO: 122 is the determined cDNA sequence for clone #20643.

[0160] SEQ ID NO: 123 is the determined cDNA sequence for clone #20652.

[0161] SEQ ID NO: 124 is the determined cDNA sequence for clone #20653.

[0162] SEQ ID NO: 125 is the determined cDNA sequence for clone #20657.

[0163] SEQ ID NO: 126 is the determined cDNA sequence for clone #20658.

[0164] SEQ ID NO: 127 is the determined cDNA sequence for clone #20660.

[0165] SEQ ID NO: 128 is the determined cDNA sequence for clone #20661.

[0166] SEQ ID NO: 129 is the determined cDNA sequence for clone #20663.

[0167] SEQ ID NO: 130 is the determined cDNA sequence for clone #20665.

[0168] SEQ ID NO: 131 is the determined cDNA sequence for clone #20670.

[0169] SEQ ID NO: 132 is the determined cDNA sequence for clone #20671.

[0170] SEQ ID NO: 133 is the determined cDNA sequence for clone #20672.

[0171] SEQ ID NO: 134 is the determined cDNA sequence for clone #20675.

[0172] SEQ ID NO: 135 is the determined cDNA sequence for clone #20679.

[0173] SEQ ID NO: 136 is the determined cDNA sequence for clone #20681.

[0174] SEQ ID NO: 137 is the determined cDNA sequence for clone #20682.

[0175] SEQ ID NO: 138 is the determined cDNA sequence for clone #20684.

[0176] SEQ ID NO: 139 is the determined cDNA sequence for clone #20685.

[0177] SEQ ID NO: 140 is the determined cDNA sequence for clone #20689.

[0178] SEQ ID NO: 141 is the determined cDNA sequence for clone #20699.

[0179] SEQ ID NO: 142 is the determined cDNA sequence for clone #20701.

[0180] SEQ ID NO: 143 is the determined cDNA sequence for clone #20702.

[0181] SEQ ID NO: 144 is the determined cDNA sequence for clone #20708.

[0182] SEQ ID NO: 145 is the determined cDNA sequence for clone #20715.

[0183] SEQ ID NO: 146 is the determined cDNA sequence for clone #20716.

[0184] SEQ ID NO: 147 is the determined cDNA sequence for clone #20719.

[0185] SEQ ID NO: 148 is the determined cDNA sequence for clone #19129.

[0186] SEQ ID NO: 149 is the determined cDNA sequence for clone #19131.1.

[0187] SEQ ID NO: 150 is the determined cDNA sequence for clone #19132.2

[0188] SEQ ID NO: 151 is the determined cDNA sequence for clone #19133.

[0189] SEQ ID NO: 152 is the determined cDNA sequence for clone #19134.2.

[0190] SEQ ID NO: 153 is the determined cDNA sequence for clone #19135.2.

[0191] SEQ ID NO: 154 is the determined cDNA sequence for clone #19137.

[0192] SEQ ID NO: 155 is a first determined cDNA sequence for clone #19138.1.

[0193] SEQ ID NO: 156 is a second determined cDNA sequence for clone #19138.2.

[0194] SEQ ID NO: 157 is the determined cDNA sequence for clone #19139.

[0195] SEQ ID NO: 158 is a first determined cDNA sequence for clone #19140.1.

[0196] SEQ ID NO: 159 is a second determined cDNA sequence for clone #19140.2.

[0197] SEQ ID NO: 160 is the determined cDNA sequence for clone #19141.

[0198] SEQ ID NO: 161 is the determined cDNA sequence for clone #19143.

[0199] SEQ ID NO: 162 is the determined cDNA sequence for clone #19144.

[0200] SEQ ID NO: 163 is a first determined cDNA sequence for clone #19145.1.

[0201] SEQ ID NO: 164 is a second determined cDNA sequence for clone #19145.2.

[0202] SEQ ID NO: 165 is the determined cDNA sequence for clone #19146.

[0203] SEQ ID NO: 166 is the determined cDNA sequence for clone #19149.1.

[0204] SEQ ID NO: 167 is the determined cDNA sequence for clone #19152.

[0205] SEQ ID NO: 168 is a first determined cDNA sequence for clone #19153.1.

[0206] SEQ ID NO: 169 is a second determined cDNA sequence for clone #19153.2.

[0207] SEQ ID NO: 170 is the determined cDNA sequence for clone #19155.

[0208] SEQ ID NO: 171 is the determined cDNA sequence for clone #19157.

[0209] SEQ ID NO: 172 is the determined cDNA sequence for clone #19159.

[0210] SEQ ID NO: 173 is the determined cDNA sequence for clone #19160.

[0211] SEQ ID NO: 174 is a first determined cDNA sequence for clone #19161.1.

[0212] SEQ ID NO: 175 is a second determined cDNA sequence for clone #19161.2.

[0213] SEQ ID NO: 176 is the determined cDNA sequence for clone #19162.1.

[0214] SEQ ID NO: 177 is the determined cDNA sequence for clone #19166.

[0215] SEQ ID NO: 178 is the determined cDNA sequence for clone #19169.

[0216] SEQ ID NO: 179 is the determined cDNA sequence for clone #19171.

[0217] SEQ ID NO: 180 is a first determined cDNA sequence for clone #19173.1.

[0218] SEQ ID NO: 181 is a second determined cDNA sequence for clone #19173.2.

[0219] SEQ ID NO: 182 is the determined cDNA sequence for clone #19174.1.

[0220] SEQ ID NO: 183 is the determined cDNA sequence for clone #19175.

[0221] SEQ ID NO: 184 is the determined cDNA sequence for clone #19177.

[0222] SEQ ID NO: 185 is the determined cDNA sequence for clone #19178.

[0223] SEQ ID NO: 186 is the determined cDNA sequence for clone #19179.1.

[0224] SEQ ID NO: 187 is the determined cDNA sequence for clone #19179.2.

[0225] SEQ ID NO: 188 is the determined cDNA sequence for clone #19180.

[0226] SEQ ID NO: 189 is a first determined cDNA sequence for clone #19182.1.

[0227] SEQ ID NO: 190 is a second determined cDNA sequence for clone #19182.2.

[0228] SEQ ID NO: 191 is the determined cDNA sequence for clone #19183.1.

[0229] SEQ ID NO: 192 is the determined cDNA sequence for clone #19185.1.

[0230] SEQ ID NO: 193 is the determined cDNA sequence for clone #19187.

[0231] SEQ ID NO: 194 is the determined cDNA sequence for clone #19188.

[0232] SEQ ID NO: 195 is the determined cDNA sequence for clone #19190.

[0233] SEQ ID NO: 196 is the determined cDNA sequence for clone #19191.

[0234] SEQ ID NO: 197 is the determined cDNA sequence for clone #19192.

[0235] SEQ ID NO: 198 is the determined cDNA sequence for clone #19193.

[0236] SEQ ID NO: 199 is a first determined cDNA sequence for clone #19194.1.

[0237] SEQ ID NO: 200 is a second determined cDNA sequence for clone #19194.2.

[0238] SEQ ID NO: 201 is the determined cDNA sequence for clone #19197.

[0239] SEQ ID NO: 202 is a first determined cDNA sequence for clone #19200.1.

[0240] SEQ ID NO: 203 is a second determined cDNA sequence for clone #19200.2.

[0241] SEQ ID NO: 204 is the determined cDNA sequence for clone #19202.

[0242] SEQ ID NO: 205 is a first determined cDNA sequence for clone #19204.1.

[0243] SEQ ID NO: 206 is a second determined cDNA sequence for clone #19204.2.

[0244] SEQ ID NO: 207 is the determined cDNA sequence for clone #9205.

[0245] SEQ ID NO: 208 is a first determined cDNA sequence for clone 19206.1.

[0246] SEQ ID NO: 209 is a second determined cDNA sequence for clone #19206.2.

[0247] SEQ ID NO: 210 is the determnined cDNA sequence for clone #19207.

[0248] SEQ ID NO: 211 is the determined cDNA sequence for clone #19208.

[0249] SEQ ID NO: 212 is a first determined cDNA sequence for clone #19211.1.

[0250] SEQ ID NO: 213 is a second determined cDNA sequence for clone #19211.2.

[0251] SEQ ID NO: 214 is a first determined cDNA sequence for clone #19214.1.

[0252] SEQ ID NO: 215 is a second determined cDNA sequence for clone #19214.2.

[0253] SEQ ID NO: 216 is the determined cDNA sequence for clone #19215.

[0254] SEQ ID NO: 217 is a first determined cDNA sequence for clone #19217.2.

[0255] SEQ ID NO: 218 is a second determined cDNA sequence for clone #19217.2.

[0256] SEQ ID NO: 219 is a first determined cDNA sequence for clone #19218.1.

[0257] SEQ ID NO: 220 is a second determined cDNA sequence for clone #19218.2.

[0258] SEQ ID NO: 221 is a first determined cDNA sequence for clone #19220.1.

[0259] SEQ ID NO: 222 is a second determined cDNA sequence for clone #19220.2.

[0260] SEQ ID NO: 223 is the determined cDNA sequence for clone #22015.

[0261] SEQ ID NO: 224 is the determined cDNA sequence for clone #22017.

[0262] SEQ ID NO: 225 is the determined cDNA sequence for clone #22019.

[0263] SEQ ID NO: 226 is the determined cDNA sequence for clone #22020.

[0264] SEQ ID NO: 227 is the determined cDNA sequence for clone #22023.

[0265] SEQ ID NO: 228 is the determined cDNA sequence for clone #22026.

[0266] SEQ ID NO: 229 is the determined cDNA sequence for clone #22027.

[0267] SEQ ID NO: 230 is the determined cDNA sequence for clone #22028.

[0268] SEQ ID NO: 231 is the determined cDNA sequence for clone #22032.

[0269] SEQ ID NO: 232 is the determined cDNA sequence for clone #22037.

[0270] SEQ ID NO: 233 is the determined cDNA sequence for clone #22045.

[0271] SEQ ID NO: 234 is the determined cDNA sequence for clone #22048.

[0272] SEQ ID NO: 235 is the determined cDNA sequence for clone #22050.

[0273] SEQ ID NO: 236 is the determined cDNA sequence for clone #22052.

[0274] SEQ ID NO: 237 is the determined cDNA sequence for clone #22053.

[0275] SEQ ID NO: 238 is the determined cDNA sequence for clone #22057.

[0276] SEQ ID NO: 239 is the determined cDNA sequence for clone #22066.

[0277] SEQ ID NO: 240 is the determined cDNA sequence for clone #22077.

[0278] SEQ ID NO: 241 is the determined cDNA sequence for clone #22085.

[0279] SEQ ID NO: 242 is the determined cDNA sequence for clone #22105.

[0280] SEQ ID NO: 243 is the determined cDNA sequence for clone #22108.

[0281] SEQ ID NO: 244 is the determined cDNA sequence for clone #22109.

[0282] SEQ ID NO: 245 is the determined cDNA sequence for clone #24842.

[0283] SEQ ID NO: 246 is the determined cDNA sequence for clone #24840.

[0284] SEQ ID NO: 247 is the determined cDNA sequence for clone #24845.

[0285] SEQ ID NO: 248 is the determined cDNA sequence for clone #24851.

[0286] SEQ ID NO: 249 is the determined cDNA sequence for clone #24852.

[0287] SEQ ID NO: 250 is the determined cDNA sequence for clone #24853.

[0288] SEQ ID NO: 251 is the determined cDNA sequence for clone #24854.

[0289] SEQ ID NO: 252 is the determined cDNA sequence for clone #24855.

[0290] SEQ ID NO: 253 is the determined cDNA sequence for clone #24860.

[0291] SEQ ID NO: 254 is the determined cDNA sequence for clone #24864.

[0292] SEQ ID NO: 255 is the determined cDNA sequence for clone #24866.

[0293] SEQ ID NO: 256 is the determined cDNA sequence for clone #24867.

[0294] SEQ ID NO: 257 is the determined cDNA sequence for clone #24868.

[0295] SEQ ID NO: 258 is the determined cDNA sequence for clone #24869.

[0296] SEQ ID NO: 259 is the determined cDNA sequence for clone #24870.

[0297] SEQ ID NO: 260 is the determined cDNA sequence for clone #24872.

[0298] SEQ ID NO: 261 is the determined cDNA sequence for clone #24873.

[0299] SEQ ID NO: 262 is the determined cDNA sequence for clone #24875.

[0300] SEQ ID NO: 263 is the determined cDNA sequence for clone #24882.

[0301] SEQ ID NO: 264 is the determined cDNA sequence for clone #24885.

[0302] SEQ ID NO: 265 is the determined cDNA sequence for clone #24886.

[0303] SEQ ID NO: 266 is the determined cDNA sequence for clone #24887.

[0304] SEQ ID NO: 267 is the determined cDNA sequence for clone #24888.

[0305] SEQ ID NO: 268 is the determined cDNA sequence for clone #24890.

[0306] SEQ ID NO: 269 is the determined cDNA sequence for clone #24896.

[0307] SEQ ID NO: 270 is the determined cDNA sequence for clone #24897.

[0308] SEQ ID NO: 271 is the determined cDNA sequence for clone #24899.

[0309] SEQ ID NO: 272 is the determined cDNA sequence for clone #24901.

[0310] SEQ ID NO: 273 is the determined cDNA sequence for clone #24902.

[0311] SEQ ID NO: 274 is the determined cDNA sequence for clone #24906.

[0312] SEQ ID NO: 275 is the determined cDNA sequence for clone #24912.

[0313] SEQ ID NO: 276 is the determined cDNA sequence for clone #24913.

[0314] SEQ ID NO: 277 is the determined cDNA sequence for clone #24920.

[0315] SEQ ID NO: 278 is the determined cDNA sequence for clone #24927.

[0316] SEQ ID NO: 279 is the determined cDNA sequence for clone #24930.

[0317] SEQ ID NO: 280 is the determined cDNA sequence for clone #26938.

[0318] SEQ ID NO: 281 is the determined cDNA sequence for clone #26939.

[0319] SEQ ID NO: 282 is the determined cDNA sequence for clone #26943.

[0320] SEQ ID NO: 283 is the determined cDNA sequence for clone #26948.

[0321] SEQ ID NO: 284 is the determined cDNA sequence for clone #26951.

[0322] SEQ ID NO: 285 is the determined cDNA sequence for clone #26955.

[0323] SEQ ID NO: 286 is the determined cDNA sequence for clone #26956.

[0324] SEQ ID NO: 287 is the determined cDNA sequence for clone #26959.

[0325] SEQ ID NO: 288 is the determined cDNA sequence for clone #26961.

[0326] SEQ ID NO: 289 is the determined cDNA sequence for clone #26962.

[0327] SEQ ID NO: 290 is the determined cDNA sequence for clone #26964.

[0328] SEQ ID NO: 291 is the determined cDNA sequence for clone #26966.

[0329] SEQ ID NO: 292 is the determined cDNA sequence for clone #26968.

[0330] SEQ ID NO: 293 is the determined cDNA sequence for clone #26972.

[0331] SEQ ID NO: 294 is the determined cDNA sequence for clone #26973.

[0332] SEQ ID NO: 295 is the determined cDNA sequence for clone #26974.

[0333] SEQ ID NO: 296 is the determined cDNA sequence for clone #26976.

[0334] SEQ ID NO: 297 is the determined cDNA sequence for clone #26977.

[0335] SEQ ID NO: 298 is the determined cDNA sequence for clone #26979.

[0336] SEQ ID NO: 299 is the determined cDNA sequence for clone #26980.

[0337] SEQ ID NO: 300 is the determined cDNA sequence for clone #26981.

[0338] SEQ ID NO: 301 is the determined cDNA sequence for clone #26984.

[0339] SEQ ID NO: 302 is the determined cDNA sequence for clone #26985.

[0340] SEQ ID NO: 303 is the determined cDNA sequence for clone #26986.

[0341] SEQ ID NO: 304 is the determined cDNA sequence for clone #26993.

[0342] SEQ ID NO: 305 is the determined cDNA sequence for clone #26994.

[0343] SEQ ID NO: 306 is the determined cDNA sequence for clone #26995.

[0344] SEQ ID NO: 307 is the determined cDNA sequence for clone #27003.

[0345] SEQ ID NO: 308 is the determined cDNA sequence for clone #27005.

[0346] SEQ ID NO: 309 is the determined cDNA sequence for clone #27010.

[0347] SEQ ID NO: 310 is the determined cDNA sequence for clone #27011.

[0348] SEQ ID NO: 311 is the determined cDNA sequence for clone #27013.

[0349] SEQ ID NO: 312 is the determined cDNA sequence for clone #27016

[0350] SEQ ID NO: 313 is the determined cDNA sequence for clone #27017.

[0351] SEQ ID NO: 314 is the determined cDNA sequence for clone #27019.

[0352] SEQ ID NO: 315 is the determined cDNA sequence for clone #27028.

[0353] SEQ ID NO: 316 is the full-length cDNA sequence for clone #19060.

[0354] SEQ ID NO: 317 is the full-length cDNA sequence for clone #18964.

[0355] SEQ ID NO: 318 is the full-length cDNA sequence for clone #18929.

[0356] SEQ ID NO: 319 is the full-length cDNA sequence for clone #18991.

[0357] SEQ ID NO: 320 is the full-length cDNA sequence for clone #18996.

[0358] SEQ ID NO: 321 is the full-length cDNA sequence for clone #18966.

[0359] SEQ ID NO: 322 is the full-length cDNA sequence for clone #18951.

[0360] SEQ ID NO: 323 is the full-length cDNA sequence for clone #18973 (also known as L516S).

[0361] SEQ ID NO: 324 is the amino acid sequence for clone #19060.

[0362] SEQ ID NO: 325 is the amino acid sequence for clone #19063.

[0363] SEQ ID NO: 326 is the amino acid sequence for clone #19077.

[0364] SEQ ID NO: 327 is the amino acid sequence for clone #19110.

[0365] SEQ ID NO: 328 is the amino acid sequence for clone #19122.

[0366] SEQ ID NO: 329 is the amino acid sequence for clone #19118.

[0367] SEQ ID NO: 330 is the amino acid sequence for clone #19080.

[0368] SEQ ID NO: 331 is the amino acid sequence for clone #19127.

[0369] SEQ ID NO: 332 is the amino acid sequence for clone #19117.

[0370] SEQ ID NO: 333 is the amino acid sequence for clone #19095, also referred to L549S.

[0371] SEQ ID NO: 334 is the amino acid sequence for clone #18964.

[0372] SEQ ID NO: 335 is the amino acid sequence for clone #18929.

[0373] SEQ ID NO: 336 is the amino acid sequence for clone #18991.

[0374] SEQ ID NO: 337 is the amino acid sequence for clone #18996.

[0375] SEQ ID NO: 338 is the amino acid sequence for clone #18966.

[0376] SEQ ID NO: 339 is the amino acid sequence for clone #18951.

[0377] SEQ ID NO: 340 is the amino acid sequence for clone #18973.

[0378] SEQ ID NO: 341 is the determined cDNA sequence for clone 26461.

[0379] SEQ ID NO: 342 is the determined cDNA sequence for clone 26462.

[0380] SEQ ID NO: 343 is the determined cDNA sequence for clone 26463.

[0381] SEQ ID NO: 344 is the determined cDNA sequence for clone 26464.

[0382] SEQ ID NO: 345 is the determined cDNA sequence for clone 26465.

[0383] SEQ ID NO: 346 is the determined cDNA sequence for clone 26466.

[0384] SEQ ID NO: 347 is the determined cDNA sequence for clone 26467.

[0385] SEQ ID NO: 348 is the determined cDNA sequence for clone 26468.

[0386] SEQ ID NO: 349 is the determined cDNA sequence for clone 26469.

[0387] SEQ ID NO: 350 is the determined cDNA sequence for clone 26470.

[0388] SEQ ID NO: 351 is the determined cDNA sequence for clone 26471.

[0389] SEQ ID NO: 352 is the determined cDNA sequence for clone 26472.

[0390] SEQ ID NO: 353 is the determined cDNA sequence for clone 26474.

[0391] SEQ ID NO: 354 is the determined cDNA sequence for clone 26475.

[0392] SEQ ID NO: 355 is the determined cDNA sequence for clone 26476.

[0393] SEQ ID NO: 356 is the determined cDNA sequence for clone 26477.

[0394] SEQ ID NO: 357 is the determined cDNA sequence for clone 26478.

[0395] SEQ ID NO: 358 is the determined cDNA sequence for clone 26479.

[0396] SEQ ID NO: 359 is the determined cDNA sequence for clone 26480.

[0397] SEQ ID NO: 360 is the determined cDNA sequence for clone 26481.

[0398] SEQ ID NO: 361 is the determined cDNA sequence for clone 26482

[0399] SEQ ID NO: 362 is the determined cDNA sequence for clone 26483.

[0400] SEQ ID NO: 363 is the determined cDNA sequence for clone 26484.

[0401] SEQ ID NO: 364 is the determined cDNA sequence for clone 26485.

[0402] SEQ ID NO: 365 is the determined cDNA sequence for clone 26486.

[0403] SEQ ID NO: 366 is the determined cDNA sequence for clone 26487.

[0404] SEQ ID NO: 367 is the determined cDNA sequence for clone 26488.

[0405] SEQ ID NO: 368 is the determined cDNA sequence for clone 26489.

[0406] SEQ ID NO: 369 is the determined cDNA sequence for clone 26490.

[0407] SEQ ID NO: 370 is the determined cDNA sequence for clone 26491.

[0408] SEQ ID NO: 371 is the determined cDNA sequence for clone 26492.

[0409] SEQ ID NO: 372 is the determined cDNA sequence for clone 26493.

[0410] SEQ ID NO: 373 is the determined cDNA sequence for clone 26494.

[0411] SEQ ID NO: 374 is the determined cDNA sequence for clone 26495.

[0412] SEQ ID NO: 375 is the determined cDNA sequence for clone 26496.

[0413] SEQ ID NO: 376 is the determined cDNA sequence for clone 26497.

[0414] SEQ ID NO: 377 is the determined cDNA sequence for clone 26498.

[0415] SEQ ID NO: 378 is the determined cDNA sequence for clone 26499.

[0416] SEQ ID NO: 379 is the determined cDNA sequence for clone 26500.

[0417] SEQ ID NO: 380 is the determined cDNA sequence for clone 26501.

[0418] SEQ ID NO: 381 is the determined cDNA sequence for clone 26502.

[0419] SEQ ID NO: 382 is the determined cDNA sequence for clone 26503.

[0420] SEQ ID NO: 383 is the determined cDNA sequence for clone 26504.

[0421] SEQ ID NO: 384 is the determined cDNA sequence for clone 26505.

[0422] SEQ ID NO: 385 is the determined cDNA sequence for clone 26506.

[0423] SEQ ID NO: 386 is the determined cDNA sequence for clone 26507.

[0424] SEQ ID NO: 387 is the determined cDNA sequence for clone 26508.

[0425] SEQ ID NO: 388 is the determined cDNA sequence for clone 26509.

[0426] SEQ ID NO: 389 is the determined cDNA sequence for clone 26511.

[0427] SEQ ID NO: 390 is the determined cDNA sequence for clone 26513.

[0428] SEQ ID NO: 391 is the determined cDNA sequence for clone 26514.

[0429] SEQ ID NO: 392 is the determined cDNA sequence for clone 26515.

[0430] SEQ ID NO: 393 is the determined cDNA sequence for clone 26516.

[0431] SEQ ID NO: 394 is the determined cDNA sequence for clone 26517.

[0432] SEQ ID NO: 395 is the determined cDNA sequence for clone 26518.

[0433] SEQ ID NO: 396 is the determined cDNA sequence for clone 26519.

[0434] SEQ ID NO: 397 is the determined cDNA sequence for clone 26520.

[0435] SEQ ID NO: 398 is the determined cDNA sequence for clone 26521.

[0436] SEQ ID NO: 399 is the determined cDNA sequence for clone 26522.

[0437] SEQ ID NO: 400 is the determined cDNA sequence for clone 26523.

[0438] SEQ ID NO: 401 is the determined cDNA sequence for clone 26524.

[0439] SEQ ID NO: 402 is the determined cDNA sequence for clone 26526.

[0440] SEQ ID NO: 403 is the determined cDNA sequence for clone 26527.

[0441] SEQ ID NO: 404 is the determined cDNA sequence for clone 26528.

[0442] SEQ ID NO: 405 is the determined cDNA sequence for clone 26529.

[0443] SEQ ID NO: 406 is the determined cDNA sequence for clone 26530.

[0444] SEQ ID NO: 407 is the determined cDNA sequence for clone 26532.

[0445] SEQ ID NO: 408 is the determined cDNA sequence for clone 26533.

[0446] SEQ ID NO: 409 is the determined cDNA sequence for clone 26534.

[0447] SEQ ID NO: 410 is the determined cDNA sequence for clone 26535.

[0448] SEQ ID NO: 411 is the determined cDNA sequence for clone 26536.

[0449] SEQ ID NO: 412 is the determined cDNA sequence for clone 26537.

[0450] SEQ ID NO: 413 is the determined cDNA sequence for clone 26538.

[0451] SEQ ID NO: 414 is the determined cDNA sequence for clone 26540.

[0452] SEQ ID NO: 415 is the determined cDNA sequence for clone 26541.

[0453] SEQ ID NO: 416 is the determined cDNA sequence for clone 26542.

[0454] SEQ ID NO: 417 is the determined cDNA sequence for clone 26543.

[0455] SEQ ID NO: 418 is the determined cDNA sequence for clone 26544.

[0456] SEQ ID NO: 419 is the determined cDNA sequence for clone 26546.

[0457] SEQ ID NO: 420 is the determined cDNA sequence for clone 26547.

[0458] SEQ ID NO: 421 is the determined cDNA sequence for clone 26548.

[0459] SEQ ID NO: 422 is the determined cDNA sequence for clone 26549.

[0460] SEQ ID NO: 423 is the determined cDNA sequence for clone 26550.

[0461] SEQ ID NO: 424 is the determined cDNA sequence for clone 26551.

[0462] SEQ ID NO: 425 is the determined cDNA sequence for clone 26552.

[0463] SEQ ID NO: 426 is the determined cDNA sequence for clone 26553.

[0464] SEQ ID NO: 427 is the determined cDNA sequence for clone 26554.

[0465] SEQ ID NO: 428 is the determined cDNA sequence for clone 26556.

[0466] SEQ ID NO: 429 is the determined cDNA sequence for clone 26557.

[0467] SEQ ID NO: 430 is the determined cDNA sequence for clone 27631.

[0468] SEQ ID NO: 431 is the determined cDNA sequence for clone 27632.

[0469] SEQ ID NO: 432 is the determined cDNA sequence for clone 27633.

[0470] SEQ ID NO: 433 is the determined cDNA sequence for clone 27635.

[0471] SEQ ID NO: 434 is the determined cDNA sequence for clone 27636.

[0472] SEQ ID NO: 435 is the determined cDNA sequence for clone 27637.

[0473] SEQ ID NO: 436 is the determined cDNA sequence for clone 27638.

[0474] SEQ ID NO: 437 is the determined cDNA sequence for clone 27639.

[0475] SEQ ID NO: 438 is the determined cDNA sequence for clone 27640.

[0476] SEQ ID NO: 439 is the determined cDNA sequence for clone 27641.

[0477] SEQ ID NO: 440 is the determined cDNA sequence for clone 27642.

[0478] SEQ ID NO: 441 is the determined cDNA sequence for clone 27644.

[0479] SEQ ID NO: 442 is the determined cDNA sequence for clone 27646.

[0480] SEQ ID NO: 443 is the determined cDNA sequence for clone 27647.

[0481] SEQ ID NO: 444 is the determined cDNA sequence for clone 27649.

[0482] SEQ ID NO: 445 is the determined cDNA sequence for clone 27650.

[0483] SEQ ID NO: 446 is the determined cDNA sequence for clone 27651.

[0484] SEQ ID NO: 447 is the determined cDNA sequence for clone 27652.

[0485] SEQ ID NO: 448 is the determined cDNA sequence for clone 27654.

[0486] SEQ ID NO: 449 is the determined cDNA sequence for clone 27655.

[0487] SEQ ID NO: 450 is the determined cDNA sequence for clone 27657.

[0488] SEQ ID NO: 451 is the determined cDNA sequence for clone 27659.

[0489] SEQ ID NO: 452 is the determined cDNA sequence for clone 27665.

[0490] SEQ ID NO: 453 is the determined cDNA sequence for clone 27666.

[0491] SEQ ID NO: 454 is the determined cDNA sequence for clone 27668.

[0492] SEQ ID NO: 455 is the determined cDNA sequence for clone 27670.

[0493] SEQ ID NO: 456 is the determined cDNA sequence for clone 27671.

[0494] SEQ ID NO: 457 is the determined cDNA sequence for clone 27672.

[0495] SEQ ID NO: 458 is the determined cDNA sequence for clone 27674.

[0496] SEQ ID NO: 459 is the determined cDNA sequence for clone 27677.

[0497] SEQ ID NO: 460 is the determined cDNA sequence for clone 27681.

[0498] SEQ ID NO: 461 is the determined cDNA sequence for clone 27682.

[0499] SEQ ID NO: 462 is the determined cDNA sequence for clone 27683.

[0500] SEQ ID NO: 463 is the determined cDNA sequence for clone 27686.

[0501] SEQ ID NO: 464 is the determined EDNA sequence for clone 27688.

[0502] SEQ ID NO: 465 is the determined cDNA sequence for clone 27689.

[0503] SEQ ID NO: 466 is the determined cDNA sequence for clone 27690.

[0504] SEQ ID NO: 467 is the determined cDNA sequence for clone 27693.

[0505] SEQ ID NO: 468 is the determined cDNA sequence for clone 27699.

[0506] SEQ ID NO: 469 is the determined cDNA sequence for clone 27700.

[0507] SEQ ID NO: 470 is the determined cDNA sequence for clone 27702.

[0508] SEQ ID NO: 471 is the determined cDNA sequence for clone 27705.

[0509] SEQ ID NO: 472 is the determined cDNA sequence for clone 27706.

[0510] SEQ ID NO: 473 is the determined cDNA sequence for clone 27707.

[0511] SEQ ID NO: 474 is the determined cDNA sequence for clone 27708.

[0512] SEQ ID NO: 475 is the determined cDNA sequence for clone 27709.

[0513] SEQ ID NO: 476 is the determined cDNA sequence for clone 27710.

[0514] SEQ ID NO: 477 is the determined cDNA sequence for clone 27711.

[0515] SEQ ID NO: 478 is the determined cDNA sequence for clone 27712.

[0516] SEQ ID NO: 479 is the determined cDNA sequence for clone 27713.

[0517] SEQ ID NO: 480 is the determined cDNA sequence for clone 27714.

[0518] SEQ ID NO: 481 is the determined cDNA sequence for clone 27715.

[0519] SEQ ID NO: 482 is the determined cDNA sequence for clone 27716.

[0520] SEQ ID NO: 483 is the determined cDNA sequence for clone 27717.

[0521] SEQ ID NO: 484 is the determined cDNA sequence for clone 27718.

[0522] SEQ ID NO: 485 is the determined cDNA sequence for clone 27719.

[0523] SEQ ID NO: 486 is the determined cDNA sequence for clone 27720.

[0524] SEQ ID NO: 487 is the determined cDNA sequence for clone 27722.

[0525] SEQ ID NO: 488 is the determined cDNA sequence for clone 27723.

[0526] SEQ ID NO: 489 is the determined cDNA sequence for clone 27724.

[0527] SEQ ID NO: 490 is the determined cDNA sequence for clone 27726.

[0528] SEQ ID NO: 491 is the determined cDNA sequence for clone 25015.

[0529] SEQ ID NO: 492 is the determined cDNA sequence for clone 25016.

[0530] SEQ ID NO: 493 is the determined cDNA sequence for clone 25017.

[0531] SEQ ID NO: 494 is the determined cDNA sequence for clone 25018

[0532] SEQ ID NO: 495 is the determined cDNA sequence for clone 25030.

[0533] SEQ ID NO: 496 is the determined cDNA sequence for clone 25033.

[0534] SEQ ID NO: 497 is the determined cDNA sequence for clone 25034.

[0535] SEQ ID NO: 498 is the determined cDNA sequence for clone 25035.

[0536] SEQ ID NO: 499 is the determined cDNA sequence for clone 25036.

[0537] SEQ ID NO: 500 is the determined cDNA sequence for clone 25037.

[0538] SEQ ID NO: 501 is the determined cDNA sequence for clone 25038.

[0539] SEQ ID NO: 502 is the determined cDNA sequence for clone 25039.

[0540] SEQ ID NO: 503 is the determined cDNA sequence for clone 25040.

[0541] SEQ ID NO: 504 is the determined cDNA sequence for clone 25042.

[0542] SEQ ID NO: 505 is the determined cDNA sequence for clone 25043.

[0543] SEQ ID NO: 506 is the determined cDNA sequence for clone 25044.

[0544] SEQ ID NO: 507 is the determined cDNA sequence for clone 25045.

[0545] SEQ ID NO: 508 is the determined cDNA sequence for clone 25047.

[0546] SEQ ID NO: 509 is the determined cDNA sequence for clone 25048.

[0547] SEQ ID NO: 510 is the determined cDNA sequence for clone 25049.

[0548] SEQ ID NO: 511 is the determined cDNA sequence for clone 25185.

[0549] SEQ ID NO: 512 is the determined cDNA sequence for clone 25186.

[0550] SEQ ID NO: 513 is the determined cDNA sequence for clone 25187.

[0551] SEQ ID NO: 514 is the determined cDNA sequence for clone 25188.

[0552] SEQ ID NO: 515 is the determined cDNA sequence for clone 25189.

[0553] SEQ ID NO: 516 is the determined cDNA sequence for clone 25190.

[0554] SEQ ID NO: 517 is the determined cDNA sequence for clone 25193.

[0555] SEQ ID NO: 518 is the determined cDNA sequence for clone 25194.

[0556] SEQ ID NO: 519 is the determined cDNA sequence for clone 25196.

[0557] SEQ ID NO: 520 is the determined cDNA sequence for clone 25198.

[0558] SEQ ID NO: 521 is the determined cDNA sequence for clone 25199.

[0559] SEQ ID NO: 522 is the determined cDNA sequence for clone 25200.

[0560] SEQ ID NO: 523 is the determined cDNA sequence for clone 25202.

[0561] SEQ ID NO: 524 is the determined cDNA sequence for clone 25364.

[0562] SEQ ID NO: 525 is the determined cDNA sequence for clone 25366.

[0563] SEQ ID NO: 526 is the determined cDNA sequence for clone 25367.

[0564] SEQ ID NO: 527 is the determined cDNA sequence for clone 25368.

[0565] SEQ ID NO: 528 is the determined cDNA sequence for clone 25369.

[0566] SEQ ID NO: 529 is the determined cDNA sequence for clone 25370.

[0567] SEQ ID NO: 530 is the determined cDNA sequence for clone 25371.

[0568] SEQ ID NO: 531 is the determined cDNA sequence for clone 25372.

[0569] SEQ ID NO: 532 is the determined cDNA sequence for clone 25373.

[0570] SEQ ID NO: 533 is the determined cDNA sequence for clone 25374.

[0571] SEQ ID NO: 534 is the determined cDNA sequence for clone 25376.

[0572] SEQ ID NO: 535 is the determined cDNA sequence for clone 25377.

[0573] SEQ ID NO: 536 is the determined cDNA sequence for clone 25378.

[0574] SEQ ID NO: 537 is the determined cDNA sequence for clone 25379.

[0575] SEQ ID NO: 538 is the determined cDNA sequence for clone 25380.

[0576] SEQ ID NO: 539 is the determined cDNA sequence for clone 25381.

[0577] SEQ ID NO: 540 is the determined cDNA sequence for clone 25382.

[0578] SEQ ID NO: 541 is the determined cDNA sequence for clone 25383.

[0579] SEQ ID NO: 542 is the determined cDNA sequence for clone 25385.

[0580] SEQ ID NO: 543 is the determined cDNA sequence for clone 25386.

[0581] SEQ ID NO: 544 is the determined cDNA sequence for clone 25387.

[0582] SEQ ID NO: 545 is the determined cDNA sequence for clone 26013.

[0583] SEQ ID NO: 546 is the determined cDNA sequence for clone 26014.

[0584] SEQ ID NO: 547 is the determined cDNA sequence for clone 26016.

[0585] SEQ ID NO: 548 is the determined cDNA sequence for clone 26017.

[0586] SEQ ID NO: 549 is the determined cDNA sequence for clone 26018.

[0587] SEQ ID NO: 550 is the determined cDNA sequence for clone 26019.

[0588] SEQ ID NO: 551 is the determined cDNA sequence for clone 26020.

[0589] SEQ ID NO: 552 is the determined cDNA sequence for clone 26021.

[0590] SEQ ID NO: 553 is the determined cDNA sequence for clone 26022.

[0591] SEQ ID NO: 554 is the determined cDNA sequence for clone 26027.

[0592] SEQ ID NO: 555 is the determined cDNA sequence for clone 26197.

[0593] SEQ ID NO: 556 is the determined cDNA sequence for clone 26199.

[0594] SEQ ID NO: 557 is the determined cDNA sequence for clone 26201.

[0595] SEQ ID NO: 558 is the determined cDNA sequence for clone 26202.

[0596] SEQ ID NO: 559 is the determined cDNA sequence for clone 26203.

[0597] SEQ ID NO: 560 is the determined cDNA sequence for clone 26204.

[0598] SEQ ID NO: 561 is the determined cDNA sequence for clone 26205.

[0599] SEQ ID NO: 562 is the determined cDNA sequence for clone 26206.

[0600] SEQ ID NO: 563 is the determined cDNA sequence for clone 26208.

[0601] SEQ ID NO: 564 is the determined cDNA sequence for clone 26211.

[0602] SEQ ID NO: 565 is the determined cDNA sequence for clone 26212.

[0603] SEQ ID NO: 566 is the determined cDNA sequence for clone 26213.

[0604] SEQ ID NO: 567 is the determined cDNA sequence for clone 26214.

[0605] SEQ ID NO: 568 is the determined cDNA sequence for clone 26215.

[0606] SEQ ID NO: 569 is the determined cDNA sequence for clone 26216.

[0607] SEQ ID NO: 570 is the determined cDNA sequence for clone 26217.

[0608] SEQ ID NO: 571 is the determined cDNA sequence for clone 26218.

[0609] SEQ ID NO: 572 is the determined cDNA sequence for clone 26219.

[0610] SEQ ID NO: 573 is the determined cDNA sequence for clone 26220.

[0611] SEQ ID NO: 574 is the determined cDNA sequence for clone 26221.

[0612] SEQ ID NO: 575 is the determined cDNA sequence for clone 26224.

[0613] SEQ ID NO: 576 is the determined cDNA sequence for clone 26225.

[0614] SEQ ID NO: 577 is the determined cDNA sequence for clone 26226.

[0615] SEQ ID NO: 578 is the determined cDNA sequence for clone 26227.

[0616] SEQ ID NO: 579 is the determined cDNA sequence for clone 26228.

[0617] SEQ ID NO: 580 is the determined cDNA sequence for clone 26230.

[0618] SEQ ID NO: 581 is the determined cDNA sequence for clone 26231.

[0619] SEQ ID NO: 582 is the determined cDNA sequence for clone 26234.

[0620] SEQ ID NO: 583 is the determined cDNA sequence for clone 26236.

[0621] SEQ ID NO: 584 is the determined cDNA sequence for clone 26237.

[0622] SEQ ID NO: 585 is the determined cDNA sequence for clone 26239.

[0623] SEQ ID NO: 586 is the determined cDNA sequence for clone 26240.

[0624] SEQ ID NO: 587 is the determined cDNA sequence for clone 26241.

[0625] SEQ ID NO: 588 is the determined cDNA sequence for clone 26242.

[0626] SEQ ID NO: 589 is the determined cDNA sequence for clone 26246.

[0627] SEQ ID NO: 590 is the determined cDNA sequence for clone 26247.

[0628] SEQ ID NO: 591 is the determined cDNA sequence for clone 26248.

[0629] SEQ ID NO: 592 is the determined cDNA sequence for clone 26249.

[0630] SEQ ID NO: 593 is the determined cDNA sequence for clone 26250.

[0631] SEQ ID NO: 594 is the determined cDNA sequence for clone 26251.

[0632] SEQ ID NO: 595 is the determined cDNA sequence for clone 26252.

[0633] SEQ ID NO: 596 is the determined cDNA sequence for clone 26253.

[0634] SEQ ID NO: 597 is the determined cDNA sequence for clone 26254.

[0635] SEQ ID NO: 598 is the determined cDNA sequence for clone 26255.

[0636] SEQ ID NO: 599 is the determined cDNA sequence for clone 26256.

[0637] SEQ ID NO: 600 is the determined cDNA sequence for clone 26257.

[0638] SEQ ID NO: 601 is the determined cDNA sequence for clone 26259.

[0639] SEQ ID NO: 602 is the determined cDNA sequence for clone 26260.

[0640] SEQ ID NO: 603 is the determined cDNA sequence for clone 26261.

[0641] SEQ ID NO: 604 is the determined cDNA sequence for clone 26262.

[0642] SEQ ID NO: 605 is the determined cDNA sequence for clone 26263.

[0643] SEQ ID NO: 606 is the determined cDNA sequence for clone 26264.

[0644] SEQ ID NO: 607 is the determined cDNA sequence for clone 26265.

[0645] SEQ ID NO: 608 is the determined cDNA sequence for clone 26266.

[0646] SEQ ID NO: 609 is the determined cDNA sequence for clone 26268.

[0647] SEQ ID NO: 610 is the determined cDNA sequence for clone 26269.

[0648] SEQ ID NO: 611 is the determined cDNA sequence for clone 26271.

[0649] SEQ ID NO: 612 is the determined cDNA sequence for clone 26273.

[0650] SEQ ID NO: 613 is the determined cDNA sequence for clone 26810.

[0651] SEQ ID NO: 614 is the determined cDNA sequence for clone 26811.

[0652] SEQ ID NO: 615 is the determined cDNA sequence for clone 26812.1.

[0653] SEQ ID NO: 616 is the determined cDNA sequence for clone 26812.2.

[0654] SEQ ID NO: 617 is the determined cDNA sequence for clone 26813.

[0655] SEQ ID NO: 618 is the determined cDNA sequence for clone 26814.

[0656] SEQ ID NO: 619 is the determined cDNA sequence for clone 26815.

[0657] SEQ ID NO: 620 is the determined cDNA sequence for clone 26816.

[0658] SEQ ID NO: 621 is the determined cDNA sequence for clone 26818.

[0659] SEQ ID NO: 622 is the determined cDNA sequence for clone 26819.

[0660] SEQ ID NO: 623 is the determined cDNA sequence for clone 26820.

[0661] SEQ ID NO: 624 is the determined cDNA sequence for clone 26821.

[0662] SEQ ID NO: 625 is the determined cDNA sequence for clone 26822.

[0663] SEQ ID NO: 626 is the determined cDNA sequence for clone 26824.

[0664] SEQ ID NO: 627 is the determined cDNA sequence for clone 26825.

[0665] SEQ ID NO: 628 is the determined cDNA sequence for clone 26826.

[0666] SEQ ID NO: 629 is the determined cDNA sequence for clone 26827.

[0667] SEQ ID NO: 630 is the determined cDNA sequence for clone 26829.

[0668] SEQ ID NO: 631 is the determined cDNA sequence for clone 26830.

[0669] SEQ ID NO: 632 is the determined cDNA sequence for clone 26831.

[0670] SEQ ID NO: 633 is the determined cDNA sequence for clone 26832.

[0671] SEQ ID NO: 634 is the determined cDNA sequence for clone 26835.

[0672] SEQ ID NO: 635 is the determined cDNA sequence for clone 26836.

[0673] SEQ ID NO: 636 is the determined cDNA sequence for clone 26837.

[0674] SEQ ID NO: 637 is the determined cDNA sequence for clone 26839.

[0675] SEQ ID NO: 638 is the determined cDNA sequence for clone 26841.

[0676] SEQ ID NO: 639 is the determined cDNA sequence for clone 26843.

[0677] SEQ ID NO: 640 is the determined cDNA sequence for clone 26844.

[0678] SEQ ID NO: 641 is the determined cDNA sequence for clone 26845.

[0679] SEQ ID NO: 642 is the determined cDNA sequence for clone 26846.

[0680] SEQ ID NO: 643 is the determined cDNA sequence for clone 26847.

[0681] SEQ ID NO: 644 is the determined cDNA sequence for clone 26848.

[0682] SEQ ID NO: 645 is the determined cDNA sequence for clone 26849.

[0683] SEQ ID NO: 646 is the determined cDNA sequence for clone 26850.

[0684] SEQ ID NO: 647 is the determined cDNA sequence for clone 26851.

[0685] SEQ ID NO: 648 is the determined cDNA sequence for clone 26852.

[0686] SEQ ID NO: 649 is the determined cDNA sequence for clone 26853.

[0687] SEQ ID NO: 650 is the determined cDNA sequence for clone 26854.

[0688] SEQ ID NO: 651 is the determined cDNA sequence for clone 26856.

[0689] SEQ ID NO: 652 is the determined cDNA sequence for clone 26857.

[0690] SEQ ID NO: 653 is the determined cDNA sequence for clone 26858.

[0691] SEQ ID NO: 654 is the determined cDNA sequence for clone 26859.

[0692] SEQ ID NO: 655 is the determined cDNA sequence for clone 26860.

[0693] SEQ ID NO: 656 is the determined cDNA sequence for clone 26862.

[0694] SEQ ID NO: 657 is the determined cDNA sequence for clone 26863.

[0695] SEQ ID NO: 658 is the determined cDNA sequence for clone 26864.

[0696] SEQ ID NO: 659 is the determined cDNA sequence for clone 26865.

[0697] SEQ ID NO: 660 is the determined cDNA sequence for clone 26867.

[0698] SEQ ID NO: 661 is the determined cDNA sequence for clone 26868.

[0699] SEQ ID NO: 662 is the determined cDNA sequence for clone 26871.

[0700] SEQ ID NO: 663 is the determined cDNA sequence for clone 26873.

[0701] SEQ ID NO: 664 is the determined cDNA sequence for clone 26875.

[0702] SEQ ID NO: 665 is the determined cDNA sequence for clone 26876.

[0703] SEQ ID NO: 666 is the determined cDNA sequence for clone 26877.

[0704] SEQ ID NO: 667 is the determined cDNA sequence for clone 26878.

[0705] SEQ ID NO: 668 is the determined cDNA sequence for clone 26880.

[0706] SEQ ID NO: 669 is the determined cDNA sequence for clone 26882.

[0707] SEQ ID NO: 670 is the determined cDNA sequence for clone 26883.

[0708] SEQ ID NO: 671 is the determined cDNA sequence for clone 26884.

[0709] SEQ ID NO: 672 is the determined cDNA sequence for clone 26885.

[0710] SEQ ID NO: 673 is the determined cDNA sequence for clone 26886.

[0711] SEQ ID NO: 674 is the determined cDNA sequence for clone 26887.

[0712] SEQ ID NO: 675 is the determined cDNA sequence for clone 26888.

[0713] SEQ ID NO: 676 is the determined cDNA sequence for clone 26889.

[0714] SEQ ID NO: 677 is the determined cDNA sequence for clone 26890.

[0715] SEQ ID NO: 678 is the determined cDNA sequence for clone 26892.

[0716] SEQ ID NO: 679 is the determined cDNA sequence for clone 26894.

[0717] SEQ ID NO: 680 is the determined cDNA sequence for clone 26895.

[0718] SEQ ID NO: 681 is the determined cDNA sequence for clone 26897.

[0719] SEQ ID NO: 682 is the determined cDNA sequence for clone 26898.

[0720] SEQ ID NO: 683 is the determined cDNA sequence for clone 26899.

[0721] SEQ ID NO: 684 is the determined cDNA sequence for clone 26900.

[0722] SEQ ID NO: 685 is the determined cDNA sequence for clone 26901.

[0723] SEQ ID NO: 686 is the determined cDNA sequence for clone 26903.

[0724] SEQ ID NO: 687 is the determined cDNA sequence for clone 26905.

[0725] SEQ ID NO: 688 is the determined cDNA sequence for clone 26906.

[0726] SEQ ID NO: 689 is the determined cDNA sequence for clone 26708.

[0727] SEQ ID NO: 690 is the determined cDNA sequence for clone 26709.

[0728] SEQ ID NO: 691 is the determined cDNA sequence for clone 26710.

[0729] SEQ ID NO: 692 is the determined cDNA sequence for clone 26711.

[0730] SEQ ID NO: 693 is the determined cDNA sequence for clone 26712.

[0731] SEQ ID NO: 694 is the determined cDNA sequence for clone 26713.

[0732] SEQ ID NO: 695 is the determined cDNA sequence for clone 26714.

[0733] SEQ ID NO: 696 is the determined cDNA sequence for clone 26715.

[0734] SEQ ID NO: 697 is the determined cDNA sequence for clone 26716.

[0735] SEQ ID NO: 698 is the determined cDNA sequence for clone 26717.

[0736] SEQ ID NO: 699 is the determined cDNA sequence for clone 26718.

[0737] SEQ ID NO: 700 is the determined cDNA sequence for clone 26719.

[0738] SEQ ID NO: 701 is the determined cDNA sequence for clone 26720.

[0739] SEQ ID NO: 702 is the determined cDNA sequence for clone 26721.

[0740] SEQ ID NO: 703 is the determined cDNA sequence for clone 26722.

[0741] SEQ ID NO: 704 is the determined cDNA sequence for clone 26723.

[0742] SEQ ID NO: 705 is the determined cDNA sequence for clone 26724.

[0743] SEQ ID NO: 706 is the determined cDNA sequence for clone 26725.

[0744] SEQ ID NO: 707 is the determined cDNA sequence for clone 26726.

[0745] SEQ ID NO: 708 is the determined cDNA sequence for clone 26727.

[0746] SEQ ID NO: 709 is the determined cDNA sequence for clone 26728.

[0747] SEQ ID NO: 710 is the determined cDNA sequence for clone 26729.

[0748] SEQ ID NO: 711 is the determined cDNA sequence for clone 26730.

[0749] SEQ ID NO: 712 is the determined cDNA sequence for clone 26731.

[0750] SEQ ID NO: 713 is the determined cDNA sequence for clone 26732.

[0751] SEQ ID NO: 714 is the determined cDNA sequence for clone 26733.1.

[0752] SEQ ID NO: 715 is the determined cDNA sequence for clone 26733.2.

[0753] SEQ ID NO: 716 is the determined cDNA sequence for clone 26734.

[0754] SEQ ID NO: 717 is the determined cDNA sequence for clone 26735.

[0755] SEQ ID NO: 718 is the determined cDNA sequence for clone 26736.

[0756] SEQ ID NO: 719 is the determined cDNA sequence for clone 26737.

[0757] SEQ ID NO: 720 is the determined cDNA sequence for clone 26738.

[0758] SEQ ID NO: 721 is the determined cDNA sequence for clone 26739.

[0759] SEQ ID NO: 722 is the determined cDNA sequence for clone 26741.

[0760] SEQ ID NO: 723 is the determined cDNA sequence for clone 26742.

[0761] SEQ ID NO: 724 is the determined cDNA sequence for clone 26743.

[0762] SEQ ID NO: 725 is the determined cDNA sequence for clone 26744.

[0763] SEQ ID NO: 726 is the determined cDNA sequence for clone 26745.

[0764] SEQ ID NO: 727 is the determined cDNA sequence for clone 26746.

[0765] SEQ ID NO: 728 is the determined cDNA sequence for clone 26747.

[0766] SEQ ID NO: 729 is the determined cDNA sequence for clone 26748.

[0767] SEQ ID NO: 730 is the determined cDNA sequence for clone 26749.

[0768] SEQ ID NO: 731 is the determined cDNA sequence for clone 26750.

[0769] SEQ ID NO: 732 is the determined cDNA sequence for clone 26751.

[0770] SEQ ID NO: 733 is the determined cDNA sequence for clone 26752.

[0771] SEQ ID NO: 734 is the determined cDNA sequence for clone 26753.

[0772] SEQ ID NO: 735 is the determined cDNA sequence for clone 26754.

[0773] SEQ ID NO: 736 is the determined cDNA sequence for clone 26755.

[0774] SEQ ID NO: 737 is the determined cDNA sequence for clone 26756.

[0775] SEQ ID NO: 738 is the determined cDNA sequence for clone 26757.

[0776] SEQ ID NO: 739 is the determined cDNA sequence for clone 26758.

[0777] SEQ ID NO: 740 is the determined cDNA sequence for clone 26759.

[0778] SEQ ID NO: 741 is the determined cDNA sequence for clone 26760.

[0779] SEQ ID NO: 742 is the determined cDNA sequence for clone 26761.

[0780] SEQ ID NO: 743 is the determined cDNA sequence for clone 26762.

[0781] SEQ ID NO: 744 is the determined cDNA sequence for clone 26763.

[0782] SEQ ID NO: 745 is the determined cDNA sequence for clone 26764.

[0783] SEQ ID NO: 746 is the determined cDNA sequence for clone 26765.

[0784] SEQ ID NO: 747 is the determined cDNA sequence for clone 26766.

[0785] SEQ ID NO: 748 is the determined cDNA sequence for clone 26767.

[0786] SEQ ID NO: 749 is the determined cDNA sequence for clone 26768.

[0787] SEQ ID NO: 750 is the determined cDNA sequence for clone 26769.

[0788] SEQ ID NO: 751 is the determined cDNA sequence for clone 26770.

[0789] SEQ ID NO: 752 is the determined cDNA sequence for clone 26771.

[0790] SEQ ID NO: 753 is the determined cDNA sequence for clone 26772.

[0791] SEQ ID NO: 754 is the determined cDNA sequence for clone 26773.

[0792] SEQ ID NO: 755 is the determined cDNA sequence for clone 26774.

[0793] SEQ ID NO: 756 is the determined cDNA sequence for clone 26775.

[0794] SEQ ID NO: 757 is the determined cDNA sequence for clone 26776.

[0795] SEQ ID NO: 758 is the determined cDNA sequence for clone 26777.

[0796] SEQ ID NO: 759 is the determined cDNA sequence for clone 26778.

[0797] SEQ ID NO: 760 is the determined cDNA sequence for clone 26779.

[0798] SEQ ID NO: 761 is the determined cDNA sequence for clone 26781.

[0799] SEQ ID NO: 762 is the determined cDNA sequence for clone 26782.

[0800] SEQ ID NO: 763 is the determined cDNA sequence for clone 26783.

[0801] SEQ ID NO: 764 is the determined cDNA sequence for clone 26784.

[0802] SEQ ID NO: 765 is the determined cDNA sequence for clone 26785.

[0803] SEQ ID NO: 766 is the determined cDNA sequence for clone 26786.

[0804] SEQ ID NO: 767 is the determined cDNA sequence for clone 26787.

[0805] SEQ ID NO: 768 is the determined cDNA sequence for clone 26788.

[0806] SEQ ID NO: 769 is the determined cDNA sequence for clone 26790.

[0807] SEQ ID NO: 770 is the determined cDNA sequence for clone 26791.

[0808] SEQ ID NO: 771 is the determined cDNA sequence for clone 26792.

[0809] SEQ ID NO: 772 is the determined cDNA sequence for clone 26793.

[0810] SEQ ID NO: 773 is the determined cDNA sequence for clone 26794.

[0811] SEQ ID NO: 774 is the determined cDNA sequence for clone 26795.

[0812] SEQ ID NO: 775 is the determined cDNA sequence for clone 26796.

[0813] SEQ ID NO: 776 is the determined cDNA sequence for clone 26797.

[0814] SEQ ID NO: 777 is the determined cDNA sequence for clone 26798.

[0815] SEQ ID NO: 778 is the determined cDNA sequence for clone 26800.

[0816] SEQ ID NO: 779 is the determined cDNA sequence for clone 26801.

[0817] SEQ ID NO: 780 is the determined cDNA sequence for clone 26802.

[0818] SEQ ID NO: 781 is the determined cDNA sequence for clone 26803.

[0819] SEQ ID NO: 782 is the determined cDNA sequence for clone 26804.

[0820] SEQ ID NO: 783 is the amino acid sequence for L773P.

[0821] SEQ ID NO: 784 is the determined DNA sequence of the L773P expression construct.

[0822] SEQ ID NO: 785 is the determined DNA sequence of the L773PA expression construct.

[0823] SEQ ID NO: 786 is a predicted amino acid sequence for L552S.

[0824] SEQ ID NO: 787 is a predicted amino acid sequence for L840P.

[0825] SEQ ID NO: 788 is the full-length cDNA sequence for L548S.

[0826] SEQ ID NO: 789 is the amino acid sequence encoded by SEQ ID NO: 788.

[0827] SEQ ID NO: 790 is an extended cDNA sequence for L552S.

[0828] SEQ ID NO: 791 is the predicted amino acid sequence encoded by the cDNA sequence of SEQ ID NO: 790.

[0829] SEQ ID NO: 792 is the determined cDNA sequence for an isoform of L552S.

[0830] SEQ ID NO: 793 is the predicted amino acid sequence encoded by SEQ ID NO: 792.

[0831] SEQ ID NO: 794 is an extended cDNA sequence for L840P.

[0832] SEQ ID NO: 795 is the predicted amino acid sequence encoded by SEQ ID NO: 794.

[0833] SEQ ID NO: 796 is an extended cDNA sequence for L801 P.

[0834] SEQ ID NO: 797 is a first predicted amino acid sequence encoded by SEQ ID NO: 796.

[0835] SEQ ID NO: 798 is a second predicted amino acid sequence encoded by SEQ ID NO: 796.

[0836] SEQ ID NO: 799 is a third predicted amino acid sequence encoded by SEQ ID NO: 796.

[0837] SEQ ID NO: 800 is the determined full-length sequence for L844P.

[0838] SEQ ID NO: 801 is the 5′ consensus cDNA sequence for L551S.

[0839] SEQ ID NO: 802 is the 3′ consensus cDNA sequence for L551S.

[0840] SEQ ID NO: 803 is the cDNA sequence for STY8.

[0841] SEQ ID NO: 804 is an extended cDNA sequence for L551S.

[0842] SEQ ID NO: 805 is the amino acid sequence for STY8.

[0843] SEQ ID NO: 806 is the extended amino acid sequence for L551S.

[0844] SEQ ID NO: 807 is the determined full length cDNA sequence for L773P.

[0845] SEQ ID NO: 808 is the full-length cDNA sequence of L552S.

[0846] SEQ ID NO: 809 is the full-length amino acid sequence of L552S.

[0847] SEQ ID NO: 810 is the determined cDNA sequence of clone 50989.

[0848] SEQ ID NO: 811 is the determined cDNA sequence of clone 50990.

[0849] SEQ ID NO: 812 is the determined cDNA sequence of clone 50992.

[0850] SEQ ID NO: 813-824 are the determined cDNA sequences for clones isolated from lung tumor tissue.

[0851] SEQ ID NO: 825 is the determined cDNA sequence for the full-length L551S clone 54305.

[0852] SEQ ID NO: 826 is the determined cDNA sequence for the full-length L551S clone 54298.

[0853] SEQ ID NO: 827 is the full-length amino acid sequence for L551S.

[0854] Tables 1-6 contain the sequence identifiers for SEQ ID NO: 828-1664.

TABLE 1A

| | CLONE | | CLONE |
|---|---|---|---|
| SEQ ID NO: | IDENTIFIER | SEQ ID NO: | IDENTIFIER |
| 828 | R0126:A02 | 869 | R0126:D12 |
| 829 | R0126:A03 | 870 | R0126:E01 |
| 830 | R0126:A05 | 871 | R0126:E02 |
| 831 | R0126:A06 | 872 | R0126:E03 |
| 832 | R0126:A08 | 873 | R0126:E04 |
| 833 | R0126:A09 | 874 | R0126:E05 |
| 834 | R0126:A10 | 875 | R0126:E06 |
| 835 | R0126:A11 | 876 | R0126:E07 |
| 836 | R0126:A12 | 877 | R0126:E08 |
| 837 | R0126:B01 | 878 | R0126:E09 |
| 838 | R0126:B03 | 879 | R0126:E10 |
| 839 | R0126:B04 | 880 | R0126:E11 |
| 840 | R0126:B05 | 881 | R0126:E12 |
| 841 | R0126:B06 | 882 | R0126:F01 |
| 842 | R0126:B07 | 883 | R0126:F02 |
| 843 | R0126:B08 | 884 | R0126:F03 |
| 844 | R0126:B09 | 885 | R0126:F04 |
| 845 | R0126:B11 | 886 | R0126:F05 |
| 846 | R0126:B12 | 887 | R0126:F06 |
| 847 | R0126:C01 | 888 | R0126:F07 |
| 848 | R0126:C02 | 889 | R0126:F08 |
| 849 | R0126:C03 | 890 | R0126:F10 |
| 850 | R0126:C05 | 891 | R0126:F11 |
| 851 | R0126:C06 | 892 | R0126:F12 |
| 852 | R0126:C07 | 893 | R0126:G01 |
| 853 | R0126:C08 | 894 | R0126:G02 |
| 854 | R0126:C09 | 895 | R0126:G03 |
| 855 | R0126:C10 | 896 | R0126:G04 |
| 856 | R0126:C11 | 897 | R0126:G05 |
| 857 | R0126:C12 | 898 | R0126:G06 |
| 858 | R0126:D01 | 899 | R0126:G07 |
| 859 | R0126:D02 | 900 | R0126:G09 |
| 860 | R0126:D03 | 901 | R0126:G10 |
| 861 | R0126:D04 | 902 | R0126:G11 |
| 862 | R0126:D05 | 903 | R0126:G12 |
| 863 | R0126:D06 | 904 | R0126:H01 |
| 864 | R0126:D07 | 905 | R0126:H02 |
| 865 | R0126:D08 | 906 | R0126:H03 |
| 866 | R0126:D09 | 907 | R0126:H04 |
| 867 | R0126:D10 | 908 | R0126:H05 |
| 868 | R0126:D11 | 909 | R0126:H06 |

[0855] TABLE 1B

| | CLONE | | CLONE |
|---|---|---|---|
| SEQ ID NO | IDENTIFIER | SEQ ID NO | IDENTIFIER |
| 910 | R0126:H07 | 951 | R0127:D10 |
| 911 | R0126:H09 | 952 | R0127:D11 |
| 912 | R0126:H10 | 953 | R0127:D12 |
| 913 | R0126:H11 | 954 | R0127:E02 |
| 914 | R0127:A02 | 955 | R0127:E03 |
| 915 | R0127:A05 | 956 | R0127:E04 |
| 916 | R0127:A06 | 957 | R0127:E05 |
| 917 | R0127:A07 | 958 | R0127:E06 |
| 918 | R0127:A08 | 959 | R0127:E07 |
| 919 | R0127:A09 | 960 | R0127:E08 |
| 920 | R0127:A10 | 961 | R0127:E09 |
| 921 | R0127:A11 | 962 | R0127:E10 |
| 922 | R0127:A12 | 963 | R0127:E11 |
| 923 | R0127:B01 | 964 | R0127:F01 |
| 924 | R0127:B03 | 965 | R0127:F02 |
| 925 | R0127:B04 | 966 | R0127:F03 |
| 926 | R0127:B05 | 967 | R0127:F04 |
| 927 | R0127:B06 | 968 | R0127:F05 |
| 928 | R0127:B07 | 969 | R0127:F06 |
| 929 | R0127:B08 | 970 | R0127:F07 |
| 930 | R0127:B09 | 971 | R0127:F08 |
| 931 | R0127:B10 | 972 | R0127:F10 |
| 932 | R0127:B11 | 973 | R0127:F11 |
| 933 | R0127:B12 | 974 | R0127:F12 |
| 934 | R0127:C01 | 975 | R0127:G01 |
| 935 | R0127:C03 | 976 | R0127:G02 |
| 936 | R0127:C04 | 977 | R0127:G03 |
| 937 | R0127:C05 | 978 | R0127:G04 |
| 938 | R0127:C07 | 979 | R0127:G05 |
| 939 | R0127:C08 | 980 | R0127:G06 |
| 940 | R0127:C09 | 981 | R0127:G07 |
| 941 | R0127:C10 | 982 | R0127:G08 |
| 942 | R0127:C11 | 983 | R0127:G09 |
| 943 | R0127:D01 | 984 | R0127:G10 |
| 944 | R0127:D02 | 985 | R0127:G11 |
| 945 | R0127:D03 | 986 | R0127:G12 |
| 946 | R0127:D04 | 987 | R0127:H01 |
| 947 | R0127:D05 | 988 | R0127:H02 |
| 948 | R0127:D06 | 989 | R0127:H03 |
| 949 | R0127:D07 | 990 | R0127:H04 |
| 950 | R0127:D01 | 991 | R0127:H05 |

[0856] TABLE 1C

| | CLONE | | CLONE |
|---|---|---|---|
| SEQ ID NO | IDENTIFIER | SEQ ID NO | IDENTIFIER |
| 992 | R0127:H06 | 1034 | R0128:D11 |
| 993 | R0127:H07 | 1035 | R0128:D12 |
| 994 | R0127:H08 | 1036 | R0128:E01 |
| 995 | R1027:H09 | 1037 | R0128:E02 |
| 996 | R1027:H10 | 1038 | R0128:E03 |
| 997 | R1027:H11 | 1039 | R0128:E04 |
| 998 | R1028:A02 | 1040 | R0128:E05 |
| 999 | R1028:A05 | 1041 | R0128:E06 |
| 1000 | R1028:A06 | 1042 | R0128:E07 |
| 1001 | R1028:A07 | 1043 | R0128:E08 |
| 1002 | R1028:A08 | 1044 | R0128:E09 |
| 1003 | R1028:A09 | 1045 | R0128:E10 |
| 1004 | R1028:A10 | 1046 | R0128:E12 |
| 1005 | R1028:B01 | 1047 | R0128:F01 |
| 1006 | R1028:B02 | 1048 | R0128:F02 |
| 1007 | R1028:B03 | 1049 | R0128:F03 |
| 1008 | R1028:B04 | 1050 | R0128:F04 |
| 1009 | R1028:B05 | 1051 | R0128:F06 |
| 1010 | R1028:B08 | 1052 | R0128:F07 |
| 1011 | R1028:B09 | 1053 | R0128:F08 |
| 1012 | R1028:B10 | 1054 | R0128:F09 |
| 1013 | R1028:B11 | 1055 | R0128:F10 |
| 1014 | R1028:B12 | 1056 | R0128:F12 |
| 1015 | R1028:C01 | 1057 | R0128:G01 |
| 1016 | R1028:C03 | 1058 | R0128:G02 |
| 1017 | R1028:C04 | 1059 | R0128:G03 |
| 1018 | R1028:C05 | 1060 | R0128:G04 |
| 1019 | R1028:C06 | 1061 | R0128:G05 |
| 1020 | R1028:C07 | 1062 | R0128:G06 |
| 1021 | R1028:C08 | 1063 | R0128:G07 |
| 1022 | R1028:C10 | 1064 | R0128:G09 |
| 1023 | R1028:C11 | 1065 | R0128:G10 |
| 1024 | R1028:C12 | 1066 | R0128:G11 |
| 1025 | R1028:D01 | 1067 | R0128:G12 |
| 1026 | R1028:D02 | 1068 | R0128:H01 |
| 1027 | R1028:D04 | 1069 | R0128:H02 |
| 1028 | R1028:D05 | 1070 | R0128:H03 |
| 1029 | R1028:D06 | 1071 | R0128:H04 |
| 1030 | R1028:D07 | 1072 | R0128:H05 |
| 1031 | R1028:D08 | 1073 | R0128:H06 |
| 1032 | R1028:D09 | 1074 | R0128:H07 |
| 1033 | R0128:D10 | 1075 | R0128:H08 |

[0857] TABLE 1D

| | CLONE | | CLONE |
|---|---|---|---|
| SEQ ID NO | IDENTIFIER | SEQ ID NO | IDENTIFIER |
| 1076 | R0128:H09 | 1118 | R0130:D12 |
| 1077 | R0128:H10 | 1119 | R0130:E01 |
| 1078 | R0128:H11 | 1120 | R0130:E02 |
| 1079 | R0130:A02 | 1121 | R0130:E03 |
| 1080 | R0130:A05 | 1122 | R0130:E04 |
| 1081 | R0130:A06 | 1123 | R0130:E05 |
| 1082 | R0130:A08 | 1124 | R0130:E06 |
| 1083 | R0130:A09 | 1125 | R0130:E07 |
| 1084 | R0130:A10 | 1126 | R0130:E08 |
| 1085 | R0130:A11 | 1127 | R0130:E09 |
| 1086 | R0130:A12 | 1128 | R0130:E10 |
| 1087 | R0130:B01 | 1129 | R0130:E11 |
| 1088 | R0130:B02 | 1130 | R0130:E12 |
| 1089 | R0130:B03 | 1131 | R0130:F02 |
| 1090 | R0130:B04 | 1132 | R0130:F03 |
| 1091 | R0130:B05 | 1133 | R0130:F05 |
| 1092 | R0130:B06 | 1134 | R0130:F06 |
| 1093 | R0130:B08 | 1135 | R0130:F07 |
| 1094 | R0130:B09 | 1136 | R0130:F08 |
| 1095 | R0130:B10 | 1137 | R0130:F09 |
| 1096 | R0130:B11 | 1138 | R0130:F10 |
| 1097 | R0130:B12 | 1139 | R0130:F11 |
| 1098 | R0130:C02 | 1140 | R0130:F12 |
| 1099 | R0130:C03 | 1141 | R0130:G01 |
| 1100 | R0130:C04 | 1142 | R0130:G02 |
| 1101 | R0130:C05 | 1143 | R0130:G03 |
| 1102 | R0130:C06 | 1144 | R0130:G04 |
| 1103 | R0130:C07 | 1145 | R0130:G05 |
| 1104 | R0130:C08 | 1146 | R0130:G06 |
| 1105 | R0130:C09 | 1147 | R0130:G07 |
| 1106 | R0130:C10 | 1148 | R0130:G08 |
| 1107 | R0130:C11 | 1149 | R0130:G09 |
| 1108 | R0130:C12 | 1150 | R0130:G10 |
| 1109 | R0130:D02 | 1151 | R0130:G11 |
| 1110 | R0130:D03 | 1152 | R0130:G12 |
| 1111 | R0130:D04 | 1153 | R0130:H01 |
| 1112 | R0130:D05 | 1154 | R0130:H02 |
| 1113 | R0130:D06 | 1155 | R0130:H04 |
| 1114 | R0130:D07 | 1156 | R0130:H05 |
| 1115 | R0130:D09 | 1157 | R0130:H06 |
| 1116 | R0130:D10 | 1158 | R0130:H07 |
| 1117 | R0130:D11 | 1159 | R0130:H08 |

[0858] TABLE 1E

| | CLONE | | CLONE |
|---|---|---|---|
| SEQ ID NO | IDENTIFIER | SEQ ID NO | IDENTIFIER |
| 1160 | R0130:H09 | 1200 | R0131:E01 |
| 1161 | R0130:H10 | 1201 | R0131:E02 |
| 1162 | R0130:H11 | 1202 | R0131:E03 |
| 1163 | R0131:A02 | 1203 | R0131:E04 |
| 1164 | R0131:A05 | 1204 | R0131:E06 |
| 1165 | R0131:A06 | 1205 | R0131:E07 |
| 1166 | R0131:A07 | 1206 | R0131:E08 |
| 1167 | R0131:A08 | 1207 | R0131:E10 |
| 1168 | R0131:A09 | 1208 | R0131:E11 |
| 1169 | R0131:A11 | 1209 | R0131:E12 |
| 1170 | R0131:A12 | 1210 | R0131:F02 |
| 1171 | R0131:B02 | 1211 | R0131:F04 |
| 1172 | R0131:B03 | 1212 | R0131:F05 |
| 1173 | R0131:B04 | 1213 | R0131:F06 |
| 1174 | R0131:B05 | 1214 | R0131:F07 |
| 1175 | R0131:B07 | 1215 | R0131:F08 |
| 1176 | R0131:B08 | 1216 | R0131:F09 |
| 1177 | R0131:B09 | 1217 | R0131:F10 |
| 1178 | R0131:B10 | 1218 | R0131:F11 |
| 1179 | R0131:B11 | 1219 | R0131:F12 |
| 1180 | R0131:C01 | 1220 | R0131:G01 |
| 1181 | R0131:C02 | 1221 | R0131:G02 |
| 1182 | R0131:C03 | 1222 | R0131:G03 |
| 1183 | R0131:C04 | 1223 | R0131:G04 |
| 1184 | R0131:C06 | 1224 | R0131:G05 |
| 1185 | R0131:C07 | 1225 | R0131:G06 |
| 1186 | R0131:C08 | 1226 | R0131:G07 |
| 1187 | R0131:C10 | 1227 | R0131:G08 |
| 1188 | R0131:C11 | 1228 | R0131:G09 |
| 1189 | R0131:C12 | 1229 | R0131:G10 |
| 1190 | R0131:D02 | 1230 | R0131:G11 |
| 1191 | R0131:D03 | 1231 | R0131:G12 |
| 1192 | R0131:D04 | 1232 | R0131:H01 |
| 1193 | R0131:D05 | 1233 | R0131:H02 |
| 1194 | R0131:D06 | 1234 | R0131:H05 |
| 1195 | R0131:D07 | 1235 | R0131:H06 |
| 1196 | R0131:D09 | 1236 | R0131:H07 |
| 1197 | R0131:D10 | 1237 | R0131:H08 |
| 1198 | R0131:D11 | 1238 | R0131:H09 |
| 1199 | R0131:D12 | 1239 | R0131:H11 |

[0859] TABLE 2
Clone names for NSCLC-SQL1 and corresponding SEQ ID NOs

| | CLONE |
|---|---|
| SEQ ID NO | IDENTIFIER |
| 1240 | Contig 54 |
| 1241 | Contig 55 |
| 1242 | Contig 57 |
| 1243 | Contig 58 |
| 1244 | Contig 60 |
| 1245 | Contig 62 |
| 1246 | Contig 63 |
| 1247 | Contig 64 |
| 1248 | Contig 65 |
| 1249 | Contig 66 |
| 1250 | Contig 67 |
| 1251 | Contig 68 |
| 1252 | Contig 69 |
| 1253 | Contig 70 |
| 1254 | Contig 71 |
| 1255 | Contig 72 |
| 1256 | Contig 73 |
| 1257 | Contig 74 |
| 1258 | Contig 75 |
| 1259 | Contig 77 |
| 1260 | Contig 78 |
| 1261 | Contig 79 |
| 1262 | Contig 80 |
| 1263 | Contig 81 |
| 1264 | Contig 83 |
| 1265 | Contig 84 |
| 1266 | Contig 86 |
| 1267 | Contig 87 |
| 1268 | Contig 88 |
| 1269 | Contig 89 |
| 1270 | Contig 90 |
| 1271 | Contig 91 |
| 1272 | Contig 92 |
| 1273 | Contig 94 |
| 1274 | Contig 95 |
| 1275 | Contig 96 |
| 1276 | Contig 97 |
| 1277 | Contig 98 |
| 1278 | Contig 99 |
| 1279 | Contig 100 |

[0860] TABLE 3
Clone names for NSCLC-SCLI and corresponding SEQ ID NOs

| | CLONE |
|---|---|
| SEQ ID NO | IDENTIFIER |
| 1280 | Contig 38 |
| 1281 | Contig 39 |
| 1282 | Contig 40 |
| 1283 | Contig 41 |
| 1284 | Contig 42 |
| 1285 | Contig 43 |
| 1286 | Contig 44 |
| 1287 | Contig 45 |
| 1288 | Contig 46 |
| 1289 | Contig 47 |
| 1290 | Contig 48 |
| 1291 | Contig 49 |
| 1292 | Contig 51 |
| 1293 | Contig 52 |
| 1294 | Contig 53 |
| 1295 | Contig 54 |
| 1296 | Contig 55 |
| 1297 | Contig 56 |
| 1298 | Contig 57 |
| 1299 | Contig 58 |
| 1300 | Contig 59 |
| 1301 | Contig 60 |
| 1302 | Contig 62 |
| 1303 | Contig 63 |
| 1304 | Contig 64 |
| 1305 | Contig 65 |
| 1306 | Contig 66 |
| 1307 | Contig 67 |
| 1308 | Contig 68 |
| 1309 | Contig 69 |
| 1310 | Contig 70 |
| 1311 | Contig 72 |
| 1312 | Contig 73 |
| 1313 | Contig 75 |
| 1314 | Contig 76 |
| 1315 | Contig 77 |
| 1316 | Contig 78 |
| 1317 | Contig 79 |
| 1318 | Contig 80 |
| 1319 | Contig 81 |
| 1320 | Contig 82 |

[0861] TABLE 4A
Clone names for NSCLC-SCL3-SCL4 and corresponding SEQ ID NOs

| | CLONE | | CLONE |
|---|---|---|---|
| SEQ ID NO | IDENTIFIER | SEQ ID NO | IDENTIFIER |
| 1321 | Contig 94 | 1363 | Contig 136 |
| 1322 | Contig 95 | 1364 | Contig 137 |
| 1323 | Contig 96 | 1365 | Contig 138 |
| 1324 | Contig 97 | 1366 | Contig 139 |
| 1325 | Contig 98 | 1367 | Contig 140 |
| 1326 | Contig 99 | 1368 | Contig 141 |
| 1327 | Contig 100 | 1369 | Contig 142 |
| 1328 | Contig 101 | 1370 | Contig 143 |
| 1329 | Contig 102 | 1371 | Contig 144 |
| 1330 | Contig 103 | 1372 | Contig 145 |
| 1331 | Contig 104 | 1373 | Contig 146 |
| 1332 | Contig 105 | 1374 | Contig 147 |
| 1333 | Contig 106 | 1375 | Contig 148 |
| 1334 | Contig 107 | 1376 | Contig 149 |
| 1335 | Contig 108 | 1377 | Contig 150 |
| 1336 | Contig 109 | 1378 | Contig 151 |
| 1337 | Contig 110 | 1379 | Contig 152 |
| 1338 | Contig 111 | 1380 | Contig 153 |
| 1339 | Contig 112 | 1381 | Contig 154 |
| 1340 | Contig 113 | 1382 | Contig 155 |
| 1341 | Contig 114 | 1383 | Contig 156 |
| 1342 | Contig 115 | 1384 | Contig 157 |
| 1343 | Contig 116 | 1385 | Contig 158 |
| 1344 | Contig 117 | 1386 | Contig 159 |
| 1345 | Contig 118 | 1387 | Contig 160 |
| 1346 | Contig 119 | 1388 | Contig 161 |
| 1347 | Contig 120 | 1389 | Contig 162 |
| 1348 | Contig 121 | 1390 | Contig 163 |
| 1349 | Contig 122 | 1391 | Contig 164 |
| 1350 | Contig 123 | 1392 | Contig 165 |
| 1351 | Contig 124 | 1393 | Contig 166 |
| 1352 | Contig 125 | 1394 | Contig 167 |
| 1353 | Contig 126 | 1395 | Contig 168 |
| 1354 | Contig 127 | 1396 | Contig 169 |
| 1355 | Contig 128 | 1397 | Contig 170 |
| 1356 | Contig 129 | 1398 | Contig 171 |
| 1357 | Contig 130 | 1399 | Contig 172 |
| 1358 | Contig 131 | 1400 | Contig 173 |
| 1359 | Contig 132 | 1401 | Contig 174 |
| 1360 | Contig 133 | 1402 | Contig 175 |
| 1361 | Contig 134 | 1403 | Contig 176 |
| 1362 | Contig 135 | | |

[0862] TABLE 4B
Clone names for NSCLC-SCL3-SCL4 and corresponding SEQ ID NOs

| | CLONE |
|---|---|
| SEQ ID NO | IDENTIFIER |
| 1404 | Contig 177 |
| 1405 | Contig 178 |
| 1406 | Contig 179 |
| 1407 | Contig 180 |
| 1408 | Contig 181 |
| 1409 | Contig 182 |
| 1410 | Contig 183 |
| 1411 | Contig 184 |
| 1412 | Contig 185 |
| 1413 | Contig 186 |
| 1414 | Contig 187 |

[0863] TABLE 5
Clone names for SCLC-SQL1 and corresponding SEQ ID NOs

| | CLONE |
|---|---|
| SEQ ID NO | IDENTIFIER |
| 1415 | Contig 17 |
| 1416 | Contig 18 |
| 1417 | Contig 20 |
| 1418 | Contig 23 |
| 1419 | Contig 24 |
| 1420 | Contig 25 |
| 1421 | Contig 26 |
| 1422 | Contig 27 |
| 1423 | Contig 28 |
| 1424 | Contig 29 |
| 1425 | Contig 30 |
| 1426 | Contig 31 |
| 1427 | Contig 20 |
| 1428 | Contig 21 |
| 1429 | Contig 22 |
| 1430 | Contig 23 |
| 1431 | Contig 24 |
| 1432 | Contig 25 |
| 1433 | Contig 26 |
| 1434 | Contig 27 |
| 1435 | Contig 28 |
| 1436 | Contig 29 |
| 1437 | Contig 30 |
| 1438 | Contig 31 |
| 1439 | Contig 32 |
| 1440 | Contig 33 |
| 1441 | Contig 34 |
| 1442 | Contig 35 |
| 1443 | Contig 36 |
| 1444 | Contig 37 |
| 1445 | Contig 38 |

[0864] TABLE 6A
Clone names for SCLC-SCL3-SCL4 and corresponding SEQ ID NOs

| | CLONE | | CLONE |
|---|---|---|---|
| SEQ ID NO | IDENTIFIER | SEQ ID NO | IDENTIFIER |
| 1446 | Contig 116 | 1488 | Contig 160 |
| 1447 | Contig 117 | 1489 | Contig 161 |
| 1448 | Contig 118 | 1490 | Contig 162 |
| 1449 | Contig 119 | 1491 | Contig 163 |
| 1450 | Contig 120 | 1492 | Contig 164 |
| 1451 | Contig 122 | 1493 | Contig 165 |
| 1452 | Contig 123 | 1494 | Contig 166 |
| 1453 | Contig 124 | 1495 | Contig 167 |
| 1454 | Contig 125 | 1496 | Contig 168 |
| 1455 | Contig 126 | 1497 | Contig 169 |
| 1456 | Contig 127 | 1498 | Contig 170 |
| 1457 | Contig 128 | 1499 | Contig 171 |
| 1458 | Contig 129 | 1500 | Contig 172 |
| 1459 | Contig 130 | 1501 | Contig 173 |
| 1460 | Contig 131 | 1502 | Contig 174 |
| 1461 | Contig 132 | 1503 | Contig 175 |
| 1462 | Contig 133 | 1504 | Contig 176 |
| 1463 | Contig 135 | 1505 | Contig 177 |
| 1464 | Contig 136 | 1506 | Contig 178 |
| 1465 | Contig 137 | 1507 | Contig 179 |
| 1466 | Contig 138 | 1508 | Contig 181 |
| 1467 | Contig 139 (L985P) | 1509 | Contig 182 |
| 1468 | Contig 140 | 1510 | Contig 183 |
| 1469 | Contig 141 | 1511 | Contig 184 |
| 1470 | Contig 142 | 1512 | Contig 185 |
| 1471 | Contig 143 | 1513 | Contig 186 |
| 1472 | Contig 144 | 1514 | Contig 187 |
| 1473 | Contig 145 | 1515 | Contig 189 |
| 1474 | Contig 146 | 1516 | Contig 190 |
| 1475 | Contig 147 | 1517 | Contig 191 |
| 1476 | Contig 148 | 1518 | Contig 192 |
| 1477 | Contig 149 | 1519 | Contig 193 |
| 1478 | Contig 150 | 1520 | Contig 194 |
| 1479 | Contig 151 | 1521 | Contig 195 |
| 1480 | Contig 152 | 1522 | Contig 196 |
| 1481 | Contig 153 | 1523 | Contig 197 |
| 1482 | Contig 154 | 1524 | Contig 198 |
| 1483 | Contig 155 | 1525 | Contig 199 |
| 1484 | Contig 156 | 1526 | Contig 200 |
| 1485 | Contig 157 | 1527 | Contig 201 |
| 1486 | Contig 158 | 1528 | Contig 202 |
| 1487 | Contig 159 | | |

[0865] TABLE 6B
Clone names for SCLC-SCL3-SCL4 and corresponding SEQ ID NOs

| | CLONE |
|---|---|
| SEQ ID NO | IDENTIFIER |
| 1529 | Contig 203 |
| 1530 | Contig 204 |
| 1531 | Contig 205 |
| 1532 | Contig 206 |
| 1533 | Contig 207 |
| 1534 | Contig 208 |
| 1535 | Contig 209 |
| 1536 | Contig 210 |
| 1537 | Contig 211 |
| 1538 | Contig 212 |
| 1539 | Contig 213 |
| 1540 | Contig 214 |
| 1541 | Contig 215 |
| 1542 | Contig 216 |
| 1543 | Contig 217 |
| 1544 | Contig 218 |
| 1545 | Contig 219 |
| 1546 | Contig 220 |
| 1547 | Contig 221 |
| 1548 | Contig 222 |
| 1549 | Contig 223 |
| 1550 | Contig 224 |
| 1551 | Contig 225 |
| 1552 | Contig 226 |
| 1553 | Contig 227 |
| 1554 | Contig 228 |
| 1555 | Contig 229 |
| 1556 | Contig 230 |
| 1557 | Contig 231 |
| 1558 | Contig 232 |
| 1559 | Contig 233 |
| 1560 | Contig 234 |
| 1561 | Contig 235 |
| 1562 | Contig 236 |
| 1563 | Contig 237 |

[0866] TABLE 7

| | CLONE | | CLONE |
|---|---|---|---|
| SEQ ID NO: | IDENTIFIER | SEQ ID NO: | IDENTIFIER |
| 1564 | R0124:E05 | 1609 | R0129:D09 |
| 1565 | R0124:E06 | 1610 | R0129:D10 |
| 1566 | R0124:E08 | 1611 | R0129:D11 |
| 1567 | R0124:F07 | 1612 | R0129:E02 |
| 1568 | R0124:F08 | 1613 | R0129:E03 |
| 1569 | R0124:F09 | 1614 | R0129:E04 |
| 1570 | R0124:G04 | 1615 | R0129:E05 |
| 1571 | R0129:A02 | 1616 | R0129:E06 |
| 1572 | R0129:A03 | 1617 | R0129:E07 |
| 1573 | R0129:A06 | 1618 | R0129:E08 |
| 1574 | R0129:A07 | 1619 | R0129:E09 |
| 1575 | R0129:A08 | 1620 | R0129:E11 |
| 1576 | R0129:A09 | 1621 | R0129:E12 |
| 1577 | R0129:A10 | 1622 | R0129:F01 |
| 1578 | R0129:A11 | 1623 | R0129:F02 |
| 1579 | R0129:A12 | 1624 | R0129:F03 |
| 1580 | R0129:B02 | 1625 | R0129:F04 |
| 1581 | R0129:B03 | 1626 | R0129:F06 |
| 1582 | R0129:B04 | 1627 | R0129:F07 |
| 1583 | R0129:B05 | 1628 | R0129:F08 |
| 1584 | R0129:B06 | 1629 | R0129:E09 |
| 1585 | R0129:B07 | 1630 | R0129:F10 |
| 1586 | R0129:B08 | 1631 | R0129:F11 |
| 1587 | R0129:B09 | 1632 | R0129:F12 |
| 1588 | R0129:B10 | 1633 | R0129:G01 |
| 1589 | R0129:B11 | 1634 | R0129:G02 |
| 1590 | R0129:B12 | 1635 | R0129:G03 |
| 1591 | R0129:C01 | 1636 | R0129:G04 |
| 1592 | R0129:C02 | 1637 | R0129:G05 |
| 1593 | R0129:C03 | 1638 | R0129:006 |
| 1594 | R0129:C04 | 1639 | R0129:G07 |
| 1595 | R0129:C06 | 1640 | R0129:G08 |
| 1596 | R0129:C07 | 1641 | R0129:G09 |
| 1597 | R0129:C08 | 1642 | R0129:G10 |
| 1598 | R0129:C09 | 1643 | R0129:G11 |
| 1599 | R0129:C10 | 1644 | R0129:G12 |
| 1600 | R0129:C11 | 1645 | R0129:H01 |
| 1601 | R0129:C12 | 1646 | R0129:H02 |
| 1602 | R0129:D01 | 1647 | R0129:H03 |
| 1603 | R0129:D03 | 1648 | R0129:H04 |
| 1604 | R0129:D04 | 1649 | R0129:H05 |
| 1605 | R0129:D05 | 1650 | R0129:H08 |
| 1606 | R0129:D06 | 1651 | R0129:H09 |
| 1607 | R0129:D07 | 1652 | R0129:H10 |
| 1608 | R0129:D08 | 1653 | R0129:H11 |

[0867] TABLE 8

| | CLONE |
|---|---|
| SEQ ID NO: | IDENTIFIER |
| 1654 | 26484 |
| 1655 | 26496 |
| 1656 | 26517 |
| 1657 | 26531 |
| 1658 | 26022 |
| 1659 | 26026 |
| 1660 | 26810 |
| 1661 | 26815 |
| 1662 | 26869 |
| 1663 | 26883 |
| 1664 | 26902 |

[0868] SEQ ID NO: 1665 and 1666 are primers used in the amplification of the coding region of L548S

[0869] SEQ ID NO: 1667 is the protein sequence of expressed recombinant L7548S.

[0870] SEQ ID NO: 1668 is the cDNA sequence of expressed recombinant L7548S.

[0871] SEQ ID NO: 1669 is the extended cDNA sequence of clone #18971 (L801 P).

[0872] SEQ ID NO: 1670 is the amino acid sequence of open reading frame ORF4 encoded by SEQ ID NO: 1669.

[0873] SEQ ID NO: 1671 is the amino acid sequence of open reading frame ORF5 encoded by SEQ ID NO: 1669.

[0874] SEQ ID NO: 1672 is the amino acid sequence of open reading frame ORF6 encoded by SEQ ID NO: 1669.

[0875] SEQ ID NO: 1673 is the amino acid sequence of open reading frame ORF7 encoded by SEQ ID NO: 1669.

[0876] SEQ ID NO: 1674 is the amino acid sequence of open reading frame ORF8 encoded by SEQ ID NO: 1669.

[0877] SEQ ID NO: 1675 is the amino acid sequence of open reading frame ORF9 encoded by SEQ ID NO: 1669.

[0878] SEQ ID NO: 1676 is the extended cDNA for contig 139 (SEQ ID NO: 1467), also known as L985P.

[0879] SEQ ID NO: 1677 is the L985P amino acid sequence encoded by SEQ ID NO: 1676.

[0880] SEQ ID NO: 1678 is the amino acid sequence of open reading frame ORF5X of SEQ ID NO: 1669.

[0881] SEQ ID NO: 1679 is the amino acid sequence of an open reading frame for contig 139 (SEQ ID NO: 1467).

[0882] SEQ ID NO: 1680-1788, set forth in the Table 9, represent cDNA clones identified by microarray analysis of the SQL1, SCL1, SCL3 and SCL4 libraries on lung chip 5.

TABLE 9

| | CLONE |
|---|---|
| SEQ ID NO: | IDENTIFIER |
| 1680 | 58456 |
| 1681 | 58458 |
| 1682 | 58462 |
| 1683 | 58469 |
| 1684 | 58470 |
| 1685 | 58482 |
| 1686 | 58485 |
| 1687 | 58501 |
| 1688 | 58502 |
| 1689 | 58505 |
| 1690 | 58507 |
| 1691 | 58509 |
| 1692 | 58512 |
| 1693 | 58527 |
| 1694 | 58529 |
| 1695 | 58531 |
| 1696 | 58537 |
| 1697 | 58539 |
| 1698 | 58545 |
| 1699 | 59319 |
| 1700 | 59322 |
| 1701 | 59348 |
| 1702 | 59350 |
| 1703 | 59363 |
| 1704 | 59365 |
| 1705 | 59370 |
| 1706 | 59373 |
| 1707 | 59376 |
| 1708 | 61050 |
| 1709 | 61051 |
| 1710 | 61052 |
| 1711 | 61054 |
| 1712 | 61056 |
| 1713 | 61057 |
| 1714 | 61060 |
| 1715 | 61062 |
| 1716 | 61063 |
| 1717 | 61064 |
| 1718 | 61065 |
| 1719 | 61066 |
| 1720 | 61069 |
| 1721 | 61070 |
| 1722 | 61071 |
| 1723 | 61074 |
| 1724 | 61075 |
| 1725 | 61077 |
| 1726 | 61079 |
| 1727 | 61080 |
| 1728 | 61081 |
| 1729 | 61083 |
| 1730 | 61085 |
| 1731 | 61086 |
| 1732 | 61088 |
| 1733 | 61090 |
| 1734 | 61091 |
| 1735 | 61093 |
| 1736 | 61094 |
| 1737 | 61096 |
| 1738 | 61097 |
| 1739 | 61099 |
| 1740 | 61100 |
| 1741 | 61103 |
| 1742 | 61105 |
| 1743 | 61106 |
| 1744 | 61110 |
| 1745 | 61113 |
| 1746 | 61115 |
| 1747 | 61117 |
| 1748 | 61118 |
| 1749 | 61119 |
| 1750 | 61120 |
| 1751 | 61122 |
| 1752 | 61125 |
| 1753 | 61126 |
| 1754 | 61130 |
| 1755 | 61133 |
| 1756 | 61134 |
| 1757 | 61135 |
| 1758 | 61137 |
| 1759 | 61139 |
| 1760 | 61143 |
| 1761 | 61144 |
| 1762 | 61148 |
| 1763 | 61151 |
| 1764 | 61155 |
| 1765 | 61156 |
| 1766 | 61159 |
| 1767 | 61160 |
| 1768 | 61163 |
| 1769 | 61167 |
| 1770 | 61172 |
| 1771 | 61173 |
| 1772 | 61176 |
| 1773 | 61177 |
| 1774 | 61183 |
| 1775 | 61185 |
| 1776 | 61188 |
| 1777 | 61192 |
| 1778 | 61198 |
| 1779 | 61201 |
| 1780 | 61202 |
| 1781 | 61204 |
| 1782 | 61206 |
| 1783 | 61210 |
| 1784 | 61212 |
| 1785 | 61216 |
| 1786 | 61225 |
| 1787 | 61226 |
| 1788 | 61227 |

[0883] SEQ ID NO: 1789 is the cDNA sequence of clone #47988 (L972P).

[0884] SEQ ID NO: 1790 is the cDNA sequence of clone #48005 (L979P).

[0885] SEQ ID NO: 1791 is an extended cDNA sequence for clone #48005 (L979P).

[0886] SEQ ID NO: 1792 is an extended cDNA sequence for clone #49826 (SEQ ID NO: 1279; L980P).

[0887] SEQ ID NO: 1793 is an extended cDNA sequence for clone #20631 (SEQ ID NO: 117; L973P).

[0888] SEQ ID NO: 1794 is an extended cDNA sequence for clone #20661 (SEQ ID NO: 128; L974P).

[0889] SEQ ID NO: 1795 is an extended cDNA sequence for clone #50430 (SEQ ID NO: 1442; L996P).

[0890] SEQ ID NO: 1796 is an extended cDNA sequence for clone #26961 (SEQ ID NO: 288; L977P).

[0891] SEQ ID NO: 1797 is an extended cDNA sequence for clone #24928 (SEQ ID NO: 1339; L978P).

[0892] SEQ ID NO: 1798 is an extended cDNA sequence for clone #50507 (SEQ ID NO: 1446; L984P).

[0893] SEQ ID NO: 1799 is an extended cDNA sequence for clone #50645 (SEQ ID NO: 1531; L988P).

[0894] SEQ ID NO: 1800 is an extended cDNA sequence for clone #50628 (SEQ ID NO: 1533; L1423P).

[0895] SEQ ID NO: 1801 is an extended cDNA sequence for clone #50560 (SEQ ID NO: 1527; L987P).

[0896] SEQ ID NO: 1802 is an extended cDNA sequence for clone #27699 (SEQ ID NO: 468; L998P).

[0897] SEQ ID NO: 1803 is an extended cDNA sequence for clone #59303 (SEQ ID NO: 949; L1425P).

[0898] SEQ ID NO: 1804 is an extended cDNA sequence for clone #59314 (SEQ ID NO: 1 156; L1426P).

[0899] SEQ ID NO: 1805 is an extended cDNA sequence for clone #59298 (SEQ ID NO: 921; L1427P).

[0900] SEQ ID NO: 1806 is an amino acid sequence encoded by SEQ ID NO: 1791.

[0901] SEQ ID NO: 1807 is an amino acid sequence encoded by SEQ ID NO: 1792.

[0902] SEQ ID NO: 1808 is an amino acid sequence encoded by SEQ ID NO: 1793.

[0903] SEQ ID NO: 1809 is an amino acid sequence encoded by SEQ ID NO: 1794.

[0904] SEQ ID NO: 1810 is an amino acid sequence encoded by SEQ ID NO: 1795.

[0905] SEQ ID NO: 1811 is an amino acid sequence encoded by SEQ ID NO: 1796.

[0906] SEQ ID NO: 1812 is an amino acid sequence encoded by SEQ ID NO: 1797.

[0907] SEQ ID NO: 1813 is an amino acid sequence encoded by SEQ ID NO: 1798.

[0908] SEQ ID NO: 1814 is an amino acid sequence encoded by SEQ ID NO: 1799.

[0909] SEQ ID NO: 1815 is an amino acid sequence encoded by SEQ ID NO: 1800.

[0910] SEQ ID NO: 1816 is an amino acid sequence encoded by SEQ ID NO: 1527 (L987P).

[0911] SEQ ID NO: 1817 is an amino acid sequence encoded by SEQ ID NO: 1823.

[0912] SEQ ID NO: 1818 is an amino acid sequence encoded by SEQ ID NO: 1801.

[0913] SEQ ID NO: 1819 is an amino acid sequence encoded by SEQ ID NO: 1802.

[0914] SEQ ID NO: 1820 is an amino acid sequence encoded by SEQ ID NO: 1803.

[0915] SEQ ID NO: 1821 is an amino acid sequence encoded by SEQ ID NO: 1804.

[0916] SEQ ID NO: 1822 is an amino acid sequence encoded by SEQ ID NO: 1805.

[0917] SEQ ID NO: 1823 is an extended cDNA sequence for clone #50560 (SEQ ID NO: 1527; L987P).

[0918] SEQ ID NO: 1824 is a full length cDNA sequence for clone L872P (SEQ ID NO: 34).

[0919] SEQ ID NO: 1825 is the amino acid sequence encoded by SEQ ID NO: 1824.

[0920] SEQ ID NO: 1826 is the cDNA sequence encoding the N-terminal portion of L552S.

[0921] SEQ ID NO: 1827-1829 are cDNA sequences of portions of L552S.

[0922] SEQ ID NO: 1830 is the N-terminal portion of L552S.

[0923] SEQ ID NO: 1831-1833 are the amino acid sequences encoded by SEQ ID NO: 1827-1829, respectively.

[0924] SEQ ID NO: 1834-1856 are the amino acid sequences of peptides of L548S.

[0925] SEQ ID NO: 1857-1860 are PCR primers.

[0926] SEQ ID NO: 1861 is the determined DNA sequence for a fusion of Ra12 and ORF4 of P801P.

[0927] SEQ ID NO: 1862 is the determined DNA sequence for a fusion of Ra12 and ORF5 of P801P.

[0928] SEQ ID NO: 1863 is the amino acid sequence of the fusion of Ra12 and ORF4 of P801P.

[0929] SEQ ID NO: 1864 is the amino acid sequence of the fusion of Ra12 and ORF5 of P801P.

[0930] SEQ ID NO: 1865 is the determined cDNA sequence for clone L984P_(573A).

[0931] SEQ ID NO: 1866 is the determined cDNA sequence for clone L984P_(512A).

[0932] SEQ ID NO: 1867 is the determined cDNA sequence for clone L984P_(NCI-H128).

[0933] SEQ ID NO: 1868 is the determined cDNA sequence for clone L984P_(DMS-79).

[0934] SEQ ID NO: 1869 is the amino acid sequence encoded by SEQ ID NO: 1865.

[0935] SEQ ID NO: 1870 is the amino acid sequence encoded by SEQ ID NO: 1866.

[0936] SEQ ID NO: 1871 is the amino acid sequence encoded by SEQ ID NO: 1867.

[0937] SEQ ID NO: 1872 is the amino acid sequence encoded by SEQ ID NO: 1868.

[0938] SEQ ID NO: 1873 is a full length cDNA sequence for clone L985P (partial sequence given in SEQ ID NO: 1467).

[0939] SEQ ID NO: 1874 is the amino acid sequence for L985P encoded by SEQ ID NO: 1873.

[0940] SEQ ID NO: 1875 is the predicted and determined cDNA sequence for a fusion of Ra12 and L985P.

[0941] SEQ ID NO: 1876 is the predicted amino acid sequence of a fusion of Ra12 and L985P encoded by SEQ ID NO: 1875.

[0942] SEQ ID NO: 1877 is the predicted cDNA sequence for a fusion of Ra12S and L985P.

[0943] SEQ ID NO: 1878 is the predicted amino acid sequence of a fusion of Ra12S and L985P encoded by SEQ ID NO: 1877.

[0944] SEQ ID NO: 1879 is the predicted cDNA sequence for a fusion of Ra12S and L985PEx.

[0945] SEQ ID NO: 1880 is the predicted amino acid sequence of a fusion of Ra12S and L985PEx encoded by SEQ ID NO: 1879.

[0946] SEQ ID NO: 1881 is the predicted cDNA sequence the extracellular loop 2 peptide of L985P.

[0947] SEQ ID NO: 1882 is the predicted amino acid sequence for the extracellular loop 2 peptide of L985P encoded by SEQ ID NO: 1875.

[0948] SEQ ID NO: 1883 is an extended cDNA sequence for clone #59316 (SEQ ID NO: 1180; L1428P).

[0949] SEQ ID NO: 1884 is a first predicted amino acid sequence encoded by SEQ ID NO: 1883 and designated L1428P-ORF1.

[0950] SEQ ID NO: 1885 is a second predicted amino acid sequence encoded by SEQ ID NO: 1883 and designated L1428P-ORF2.

[0951] SEQ ID NO: 1886 is a third predicted amino acid sequence encoded by SEQ ID NO: 1883 and designated L1428P-ORF3.

[0952] SEQ ID NO: 1887 is a fourth predicted amino acid sequence encoded by SEQ ID NO: 1883 and designated L1428P-ORF4.

[0953] SEQ ID NO: 1888 is a fifth predicted amino acid sequence encoded by SEQ ID NO: 1883 and designated L1428P-ORF5.

[0954] SEQ ID NO: 1889 is a sixth predicted amino acid sequence encoded by SEQ ID NO: 1883 and designated L1428P-ORF6.

[0955] SEQ ID NO: 1890 is a seventh predicted amino acid sequence encoded by SEQ ID NO: 1883 and designated L1428P-ORF7.

[0956] SEQ ID NO: 1891-1900 are the nucleotide sequences for the database hits described in Table 17.

[0957] SEQ ID NO: 1901-1909 are the deduced amino acid sequences encoded by the nucleotide sequences described in Table 17.

[0958] SEQ ID NO: 1910 is the full-length cDNA for clone L1437P (partial sequence given in SEQ ID NO: 1896).

[0959] SEQ ID NO: 1911 is the forward primer PDM-433 for the coding region of clone L548S.

[0960] SEQ ID NO: 1912 is the reverse primer PDM-438 for the coding region of clone L548S.

[0961] SEQ ID NO: 1913 is the amino acid sequence for the expressed recombinant L548S.

[0962] SEQ ID NO: 1914 is the DNA coding sequence for the recombinant L548S.

[0963] SEQ ID NO: 1915 is the forward primer PDM-498 for the coding region of clone L551S

[0964] SEQ ID NO: 1916 is the reverse primer PDM-499 for the coding region of clone L551S

[0965] SEQ ID NO: 1917 is the amino acid sequence for the expressed recombinant L551S.

[0966] SEQ ID NO: 1918 is the DNA coding sequence for the recombinant L551S.

[0967] SEQ ID NO: 1919 is the forward primer PDM-479 for the coding region of clone L552S

[0968] SEQ ID NO: 1920 is the reverse primer PDM-480 for the coding region of clone L552S

[0969] SEQ ID NO: 1921 is the amino acid sequence for the expressed recombinant L552S.

[0970] SEQ ID NO: 1922 is the DNA coding sequence for the recombinant L552S.

[0971] SEQ ID NO: 1923 is the predicted full-length cDNA sequence for clone #19069 (partial sequence given in SEQ ID NO: 90).

[0972] SEQ ID NO: 1924 is the predicted full-length cDNA sequence for clone #18965 or #19002 (partial sequence given in SEQ ID NO: 15).

[0973] SEQ ID NO: 1925 is the deduced amino acid sequence encoded by SEQ ID NO: 1923.

[0974] SEQ ID NO: 1926 is the deduced amino acid sequence encoded by SEQ ID NO: 1924.

[0975] SEQ ID NO: 1927 is the determined amino acid sequence of a first L552S epitope.

[0976] SEQ ID NO: 1928 is the determined amino acid sequence of a second L552S epitope.

[0977] SEQ ID NO: 1929 is the determined amino acid sequence of a third L552S epitope.

[0978] SEQ ID NO: 1930 is the amino acid sequence for L985P peptide #3482.

[0979] SEQ ID NO: 1931 is an extended cDNA sequence for clone #61144 (SEQ ID NO: 1761, L1439P).

[0980] SEQ ID NO: 1932 is the deduced amino acid sequence encoded by SEQ ID NO: 1931.

[0981] SEQ ID NO: 1933 is the full-length cDNA of the NUF2R gene to which SEQ ID NO: 1931 shows some sequence similarity.

[0982] SEQ ID NO: 1934 is the deduced amino acid sequence encoded by SEQ ID NO: 1933.

[0983] SEQ ID NO: 1935 is a forward primer PDM-737 for the coding region of clone L552S.

[0984] SEQ ID NO: 1936 is a reverse primer PDM-738 for the coding region of clone L552S.

[0985] SEQ ID NO: 1937 is the amino acid sequence for the expressed recombinant L552S.

[0986] SEQ ID NO: 1938 is the DNA coding sequence for the recombinant L552S.

[0987] SEQ ID NO: 1939 is another forward primer PDM-736 for the coding region of clone L552S.

[0988] SEQ ID NO: 1940 is the amino acid sequence for a second expressed recombinant L552S.

[0989] SEQ ID NO: 1941 is the DNA coding sequence for a second recombinant L552S.

[0990] SEQ ID NO: 1942 is the determined amino acid sequence of a fourth L552S epitope.

[0991] SEQ ID NO: 1943 is the determined amino acid sequence of a first XAGE-1 epitope.

[0992] SEQ ID NO: 1944 is the determined amino acid sequence of a second XAGE-1 epitope.

[0993] SEQ ID NO: 1945 is the determined amino acid sequence of a first 20-mer peptide corresponding to amino acid residues 1-20 of full-length L552S (SEQ ID NO: 809).

[0994] SEQ ID NO: 1946 is the determined amino acid sequence of a second 20-mer peptide corresponding to amino acid residues 6-25 of full-length L552S (SEQ ID NO: 809).

[0995] SEQ ID NO: 1947 is the determined amino acid sequence of a third 20-mer peptide corresponding to amino acid residues 11-30 of full-length L552S (SEQ ID NO: 809).

[0996] SEQ ID NO: 1948 is the determined amino acid sequence of a fourth 20-mer peptide corresponding to amino acid residues 16-35 of full-length L552S (SEQ ID NO: 809).

[0997] SEQ ID NO: 1949 is the determined amino acid sequence of a fifth 20-mer peptide corresponding to amino acid residues 21-40 of full-length L552S (SEQ ID NO: 809).

[0998] SEQ ID NO: 1950 is the determined amino acid sequence of a sixth 20-mer peptide corresponding to amino acid residues 26-45 of full-length L552S (SEQ ID NO: 809).

[0999] SEQ ID NO: 1951 is the determined amino acid sequence of a seventh 20-mer peptide corresponding to amino acid residues 31-50 of full-length L552S (SEQ ID NO: 809).

[1000] SEQ ID NO: 1952 is the determined amino acid sequence of a eigth 20-mer peptide corresponding to amino acid residues 36-55 of full-length L552S (SEQ ID NO: 809).

[1001] SEQ ID NO: 1953 is the determined amino acid sequence of a ninth 20-mer peptide corresponding to amino acid residues 41-60 of full-length L552S (SEQ ID NO: 809).

[1002] SEQ ID NO: 1954 is the determined amino acid sequence of a tenth 20-mer peptide corresponding to amino acid residues 46-65 of full-length L552S (SEQ ID NO: 809).

[1003] SEQ ID NO: 1955 is the determined amino acid sequence of a eleventh 20-mer peptide corresponding to amino acid residues 51-70 of full-length L552S (SEQ ID NO: 809).

[1004] SEQ ID NO: 1955 is the determined amino acid sequence of a twelveth 20-mer peptide corresponding to amino acid residues 56-75 of full-length L552S (SEQ ID NO: 809).

[1005] SEQ ID NO: 1956 is the determined amino acid sequence of a thirth 20-mer peptide corresponding to amino acid residues 61-80 of full-length L552S (SEQ ID NO: 809).

[1006] SEQ ID NO: 1957 is the determined amino acid sequence of a fourteenth 20-mer peptide corresponding to amino acid residues 66-85 of full-length L552S (SEQ ID NO: 809).

[1007] SEQ ID NO: 1958 is the determined amino acid sequence of a fifteenth 20-mer peptide corresponding to amino acid residues 71-90 of full-length L552S (SEQ ID NO: 809).

[1008] SEQ ID NO: 1959 is the determined amino acid sequence of a sixteenth 20-mer peptide corresponding to amino acid residues 76-95 of full-length L552S (SEQ ID NO: 809).

[1009] SEQ ID NO: 1961 is the determined amino acid sequence of a seventeen 20-mer peptide corresponding to amino acid residues 81-100 of full-length L552S (SEQ ID NO: 809).

[1010] SEQ ID NO: 1962 is the determined amino acid sequence of a eighthth 20-mer peptide corresponding to amino acid residues 86-105 of full-length L552S (SEQ ID NO: 809).

[1011] SEQ ID NO: 1963 is the determined amino acid sequence of a nineteenth 20-mer peptide corresponding to amino acid residues 91-110 of full-length L552S (SEQ ID NO: 809).

[1012] SEQ ID NO: 1964 is the determined amino acid sequence of a twentieth 20-mer peptide corresponding to amino acid residues 96-115 of full-length L552S (SEQ ID NO: 809).

[1013] SEQ ID NO: 1965 is the determined amino acid sequence of a twenty-first 20-mer peptide corresponding to amino acid residues 101-120 of full-length L552S (SEQ ID NO: 809).

[1014] SEQ ID NO: 1966 is the determined amino acid sequence of a twenty-second 20-mer peptide corresponding to amino acid residues 106-125 of full-length L552S (SEQ ID NO: 809).

[1015] SEQ ID NO: 1967 is the determined amino acid sequence of a twenty-third 20-mer peptide corresponding to amino acid residues 111-130 of full-length L552S (SEQ ID NO: 809).

[1016] SEQ ID NO: 1968 is the determined amino acid sequence of a twenty-fourth 20-mer peptide corresponding to amino acid residues 116-135 of full-length L552S (SEQ ID NO: 809).

[1017] SEQ ID NO: 1969 is the determined amino acid sequence of a twenty-fifth 20-mer peptide corresponding to amino acid residues 121-140 of full-length L552S (SEQ ID NO: 809).

[1018] SEQ ID NO: 1970 is the determined amino acid sequence of a twenty-sixth 20-mer peptide corresponding to amino acid residues 126-145 of full-length L552S (SEQ ID NO: 809).

[1019] SEQ ID NO: 1971 is the determined amino acid sequence of a twenth-seventh 20-mer peptide corresponding to amino acid residues 131-150 of full-length L552S (SEQ ID NO: 809).

[1020] SEQ ID NO: 1972 is the determined amino acid sequence of a twenty-eigth 20-mer peptide corresponding to amino acid residues 136-155 of full-length L552S (SEQ ID NO: 809).

[1021] SEQ ID NO: 1973 is the determined amino acid sequence of a twenty-ninth 20-mer peptide corresponding to amino acid residues 141-160 of full-length L552S (SEQ ID NO: 809).

[1022] SEQ ID NO: 1974 is the DNA sequence which encodes the 20-mer of SEQ ID NO: 1945.

[1023] SEQ ID NO: 1975 is the DNA sequence which encodes the 20-mer of SEQ ID NO: 1946.

[1024] SEQ ID NO: 1976 is the DNA sequence which encodes the 20-mer of SEQ ID NO: 1947.

[1025] SEQ ID NO: 1977 is the DNA sequence which encodes the 20-mer of SEQ ID NO: 1948.

[1026] SEQ ID NO: 1978 is the DNA sequence which encodes the 20-mer of SEQ ID NO: 1949.

[1027] SEQ ID NO: 1979 is the DNA sequence which encodes the 20-mer of SEQ ID NO: 1950.

[1028] SEQ ID NO: 1980 is the DNA sequence which encodes the 20-mer of SEQ ID NO: 1951.

[1029] SEQ ID NO: 1981 is the DNA sequence which encodes the 20-mer of SEQ ID NO: 1952.

[1030] SEQ ID NO: 1982 is the DNA sequence which encodes the 20-mer of SEQ ID NO: 1953.

[1031] SEQ ID NO: 1983 is the DNA sequence which encodes the 20-mer of SEQ ID NO: 1954.

[1032] SEQ ID NO: 1984 is the DNA sequence which encodes the 20-mer of SEQ ID NO: 1955.

[1033] SEQ ID NO: 1985 is the DNA sequence which encodes the 20-mer of SEQ ID NO: 1956.

[1034] SEQ ID NO: 1986 is the DNA sequence which encodes the 20-mer of SEQ ID NO: 1957.

[1035] SEQ ID NO: 1987 is the DNA sequence which encodes the 20-mer of SEQ ID NO: 1958.

[1036] SEQ ID NO: 1988 is the DNA sequence which encodes the 20-mer of SEQ ID NO: 1959.

[1037] SEQ ID NO: 1989 is the DNA sequence which encodes the 20-mer of SEQ ID NO: 1960.

[1038] SEQ ID NO: 1990 is the DNA sequence which encodes the 20-mer of SEQ ID NO: 1961.

[1039] SEQ ID NO: 1991 is the DNA sequence which encodes the 20-mer of SEQ ID NO: 1962.

[1040] SEQ ID NO: 1992 is the DNA sequence which encodes the 20-mer of SEQ ID NO: 1963.

[1041] SEQ ID NO: 1993 is the DNA sequence which encodes the 20-mer of SEQ ID NO: 1964.

[1042] SEQ ID NO: 1994 is the DNA sequence which encodes the 20-mer of SEQ ID NO: 1965.

[1043] SEQ ID NO: 1995 is the DNA sequence which encodes the 20-mer of SEQ ID NO: 1966.

[1044] SEQ ID NO: 1996 is the DNA sequence which encodes the 20-mer of SEQ ID NO: 1967.

[1045] SEQ ID NO: 1997 is the DNA sequence which encodes the 20-mer of SEQ ID NO: 1968.

[1046] SEQ ID NO: 1998 is the DNA sequence which encodes the 20-mer of SEQ ID NO: 1969.

[1047] SEQ ID NO: 1999 is the DNA sequence which encodes the 20-mer of SEQ ID NO: 1970.

[1048] SEQ ID NO: 2000 is the DNA sequence which encodes the 20-mer of SEQ ID NO: 1971.

[1049] SEQ ID NO: 2001 is the DNA sequence which encodes the 20-mer of SEQ ID NO: 1972.

[1050] SEQ ID NO: 2002 is the DNA sequence which encodes the 20-mer of SEQ ID NO: 1973.

### DETAILED DESCRIPTION OF THE INVENTION

[1051] The present invention is directed generally to compositions and their use in the therapy and diagnosis of cancer, particularly lung cancer. As described further below, illustrative compositions of the present invention include, but are not restricted to, polypeptides, particularly immunogenic polypeptides, polynucleotides encoding such polypeptides, antibodies and other binding agents, antigen presenting cells (APCs) and immune system cells (e.g., T cells).

[1052] The practice of the present invention will employ, unless indicated specifically to the contrary, conventional methods of virology, immunology, microbiology, molecular biology and recombinant DNA techniques within the skill of the art, many of which are described below for the purpose of illustration. Such techniques are explained fully in the literature. See, e.g., Sambrook, et al. Molecular Cloning: A Laboratory Manual (2nd Edition, 1989); Maniatis et al. Molecular Cloning: A Laboratory Manual (1982); DNA Cloning: A Practical Approach, vol. I & II (D. Glover, ed.); Oligonucleotide Synthesis (N. Gait, ed., 1984); Nucleic Acid Hybridization (B. Hames & S. Higgins, eds., 1985); Transcription and Translation (B. Hames & S. Higgins, eds., 1984); Animal Cell Culture (R. Freshney, ed., 1986); Perbal, A Practical Guide to Molecular Cloning (1984).

[1053] All publications, patents and patent applications cited herein, whether supra or infra, are hereby incorporated by reference in their entirety.

[1054] As used in this specification and the appended claims, the singular forms “a,” “an” and “the” include plural references unless the content clearly dictates otherwise.

[1055] Polypeptide Compositions

[1056] As used herein, the term “polypeptide” “is used in its conventional meaning, i.e., as a sequence of amino acids. The polypeptides are not limited to a specific length of the product; thus, peptides, oligopeptides, and proteins are included within the definition of polypeptide, and such termns may be used interchangeably herein unless specifically indicated otherwise. This term also does not refer to or exclude post-expression modifications of the polypeptide, for example, glycosylations, acetylations, phosphorylations and the like, as well as other modifications known in the art, both naturally occurring and non-naturally occurring. A polypeptide may be an entire protein, or a subsequence thereof. Particular polypeptides of interest in the context of this invention are amino acid subsequences comprising epitopes, i.e., antigenic determinants substantially responsible for the immunogenic properties of a polypeptide and being capable of evoking an immune response.

[1057] Particularly illustrative polypeptides of the present invention comprise those encoded by a polynucleotide sequence set forth in any one of SEQ ID NOs: 1-57, 59-323, 341-782, 784-785, 788, 790, 792, 794, 796, 800-804, 807, 808, 810-826, 828-1664, 1668, 1669, 1676, 1680-1805, 1824, 1826-1829, 1865-1868, 1873, 1875, 1877, 1879, 1881, 1883, 1891-1900, 1910, 1914, 1918, 1922-1924, 1931, 1933, 1938, 1941 and 1974-2002, or a sequence that hybridizes under moderately stringent conditions, or, alternatively, under highly stringent conditions, to a polynucleotide sequence set forth in any one of SEQ ID NOs: 1-57, 59-323, 341-782, 784-785, 788, 790, 792, 794, 796, 800-804, 807, 808, 810-826, 828-1664, 1668, 1669, 1676, 1680-1805, 1824, 1826-1829, 1865-1868, 1873, 1875, 1877, 1879, 1881, 1883, 1891-1900, 1910, 1914, 1918, 1922-1924, 1931, 1933, 1938, 1941 and 1974-2002. Certain other illustrative polypeptides of the invention comprise amino acid sequences as set forth in any one of SEQ ID NOs: 324-340, 786, 787, 789, 791, 793, 795, 797-799, 805, 806, 809, 827, 1667, 1670-1675, 1677-1679, 1806-1822, 1825, 1830-1833, 1834-1856, 1863, 1864, 1869-1872, 1874, 1876, 1878, 1880, 1882, 1884-1890, 1901-1909, 1913, 1917, 1921, 1925-1930, 1932, 1934, 1937, 1940 and 1942-1973.

[1058] The polypeptides of the present invention are sometimes herein referred to as lung tumor proteins or lung tumor polypeptides, as an indication that their identification has been based at least in part upon their increased levels of expression in lung tumor samples. Thus, a “lung tumor polypeptide” or “lung tumor protein,” refers generally to a polypeptide sequence of the present invention, or a polynucleotide sequence encoding such a polypeptide, that is expressed in a substantial proportion of lung tumor samples, for example preferably greater than about 20%, more preferably greater than about 30%, and most preferably greater than about 50% or more of lung tumor samples tested, at a level that is at least two fold, and preferably at least five fold, greater than the level of expression in normal tissues, as determined using a representative assay provided herein. A lung tumor polypeptide sequence of the invention, based upon its increased level of expression in tumor cells, has particular utility both as a diagnostic marker as well as a therapeutic target, as further described below.

[1059] In certain preferred embodiments, the polypeptides of the invention are immunogenic, i.e., they react detectably within an immunoassay (such as an ELISA or T-cell stimulation assay) with antisera and/or T-cells from a patient with lung cancer. Screening for immunogenic activity can be performed using techniques well known to the skilled artisan. For example, such screens can be performed using methods such as those described in Harlow and Lane, Antibodies: A Laboratory Manual, Cold Spring Harbor Laboratory, 1988. In one illustrative example, a polypeptide may be immobilized on a solid support and contacted with patient sera to allow binding of antibodies within the sera to the immobilized polypeptide. Unbound sera may then be removed and bound antibodies detected using, for example, ¹²⁵I-labeled Protein A.

[1060] As would be recognized by the skilled artisan, immunogenic portions of the polypeptides disclosed herein are also encompassed by the present invention. An “immunogenic portion,” as used herein, is a fragment of an immunogenic polypeptide of the invention that itself is immunologically reactive (i.e., specifically binds) with the B-cells and/or T-cell surface antigen receptors that recognize the polypeptide. Immunogenic portions may generally be identified using well known techniques, such as those summarized in Paul, Fuindamental Immunology, 3rd ed., 243-247 (Raven Press, 1993) and references cited therein. Such techniques include screening polypeptides for the ability to react with antigen-specific antibodies, antisera and/or T-cell lines or clones. As used herein, antisera and antibodies are “antigen-specific” if they specifically bind to an antigen (i.e., they react with the protein in an ELISA or other immunoassay, and do not react detectably with unrelated proteins). Such antisera and antibodies may be prepared as described herein, and using well-known techniques.

[1061] In one preferred embodiment, an immunogenic portion of a polypeptide of the present invention is a portion that reacts with antisera and/or T-cells at a level that is not substantially less than the reactivity of the full-length polypeptide (e.g., in an ELISA and/or T-cell reactivity assay). Preferably, the level of immunogenic activity of the immunogenic portion is at least about 50%, preferably at least about 70% and most preferably greater than about 90% of the immunogenicity for the full-length polypeptide. In some instances, preferred immunogenic portions will be identified that have a level of immunogenic activity greater than that of the corresponding full-length polypeptide, e.g., having greater than about 100% or 150% or more immunogenic activity.

[1062] In certain other embodiments, illustrative immunogenic portions may include peptides in which an N-terminal leader sequence and/or transmembrane domain have been deleted. Other illustrative immunogenic portions will contain a small N- and/or C-terminal deletion (e.g., 1-30 amino acids, preferably 5-15 amino acids), relative to the mature protein.

[1063] In another embodiment, a polypeptide composition of the invention may also comprise one or more polypeptides that are immunologically reactive with T cells and/or antibodies generated against a polypeptide of the invention, particularly a polypeptide having an amino acid sequence disclosed herein, or to an immunogenic fragment or variant thereof.

[1064] In another embodiment of the invention, polypeptides are provided that comprise one or more polypeptides that are capable of eliciting T cells and/or antibodies that are immunologically reactive with one or more polypeptides described herein, or one or more polypeptides encoded by contiguous nucleic acid sequences contained in the polynucleotide sequences disclosed herein, or immunogenic fragments or variants thereof, or to one or more nucleic acid sequences which hybridize to one or more of these sequences under conditions of moderate to high stringency.

[1065] The present invention, in another aspect, provides polypeptide fragments comprising at least about 5, 10, 15, 20, 25, 50, or 100 contiguous amino acids, or more, including all intermediate lengths, of a polypeptide compositions set forth herein, such as those set forth in SEQ ID NOs: 324-340, 786, 787, 789, 791, 793, 795, 797-799, 805, 806, 809, 827, 1667, 1670-1675, 1677-1679, 1806-1822, 1825, 1830-1833, 1834-1856, 1863, 1864, 1869-1872, 1874, 1876, 1878, 1880, 1882, 1884-1890, 1901-1909, 1913, 1917, 1921, 1925-1930, 1932, 1934, 1937, 1940 and 1942-1973, or those encoded by a polynucleotide sequence set forth in a sequence of SEQ ID NOs: 1-57, 59-323, 341-782, 784-785, 788, 790, 792, 794, 796, 800-804, 807, 808, 810-826, 828-1664, 1668, 1669, 1676, 1680-1805, 1824, 1826-1829, 1865-1868, 1873, 1875, 1877, 1879, 1881, 1883, 1891-1900, 1910, 1914, 1918, 1922-1924, 1931, 1933, 1938, 1941 and 1974-2002.

[1066] In another aspect, the present invention provides variants of the polypeptide compositions described herein. Polypeptide variants generally encompassed by the present invention will typically exhibit at least about 70%, 75%, 80%, 85%, 90%, 91%, 92%, 93%, 94%, 95%, 96%, 97%, 98%, or 99% or more identity (determined as described below), along its length, to a polypeptide sequences set forth herein.

[1067] In one preferred embodiment, the polypeptide fragments and variants provide by the present invention are immunologically reactive with an antibody and/or T-cell that reacts with a full-length polypeptide specifically set for the herein.

[1068] In another preferred embodiment, the polypeptide fragments and variants provided by the present invention exhibit a level of immunogenic activity of at least about 50%, preferably at least about 70%, and most preferably at least about 90% or more of that exhibited by a full-length polypeptide sequence specifically set forth herein.

[1069] A polypeptide “variant,” as the term is used herein, is a polypeptide that typically differs from a polypeptide specifically disclosed herein in one or more substitutions, deletions, additions and/or insertions. Such variants may be naturally occurring or may be synthetically generated, for example, by modifying one or more of the above polypeptide sequences of the invention and evaluating their immunogenic activity as described herein and/or using any of a number of techniques well known in the art.

[1070] For example, certain illustrative variants of the polypeptides of the invention include those in which one or more portions, such as an N-terminal leader sequence or transmembrane domain, have been removed. Other illustrative variants include variants in which a small portion (e.g., 1-30 amino acids, preferably 5-15 amino acids) has been removed from the N- and/or C-terminal of the mature protein.

[1071] In many instances, a variant will contain conservative substitutions. A “conservative substitution” is one in which an amino acid is substituted for another amino acid that has similar properties, such that one skilled in the art of peptide chemistry would expect the secondary structure and hydropathic nature of the polypeptide to be substantially unchanged. As described above, modifications may be made in the structure of the polynucleotides and polypeptides of the present invention and still obtain a functional molecule that encodes a variant or derivative polypeptide with desirable characteristics, e.g., with immunogenic characteristics. When it is desired to alter the amino acid sequence of a polypeptide to create an equivalent, or even an improved, immunogenic variant or portion of a polypeptide of the invention, one skilled in the art will typically change one or more of the codons of the encoding DNA sequence according to Table 10.

[1072] For example, certain amino acids may be substituted for other amino acids in a protein structure without appreciable loss of interactive binding capacity with structures such as, for example, antigen-binding regions of antibodies or binding sites on substrate molecules. Since it is the interactive capacity and nature of a protein that defines that protein's biological functional activity, certain amino acid sequence substitutions can be made in a protein sequence, and, of course, its underlying DNA coding sequence, and nevertheless obtain a protein with like properties. It is thus contemplated that various changes may be made in the peptide sequences of the disclosed compositions, or corresponding DNA sequences which encode said peptides without appreciable loss of their biological utility or activity.

TABLE 10

| Amino Acids | | | Codons | | | | | |
|---|---|---|---|---|---|---|---|---|
| Alanine | Ala | A | GCA | GCC | GCG | GCU | | |
| Cysteine | Cys | C | UGC | UGU | | | | |
| Aspartic acid | Asp | D | GAC | GAU | | | | |
| Glutamic acid | Glu | E | GAA | GAG | | | | |
| Phenylalanine | Phe | F | UUC | UUU | | | | |
| Glycine | Gly | G | GGA | GGC | GGG | GGU | | |
| Histidine | His | H | CAC | CAU | | | | |
| Isoleucine | Ile | I | AUA | AUC | AUU | | | |
| Lysine | Lys | K | AAA | AAG | | | | |
| Leucine | Leu | L | UUA | UUG | CUA | CUC | CUG | CUU |
| Methionine | Met | M | AUG | | | | | |
| Asparagine | Asn | N | AAC | AAU | | | | |
| Proline | Pro | P | CCA | CCC | CCG | CCU | | |
| Glutamine | Gln | Q | CAA | CAG | | | | |
| Arginine | Arg | R | AGA | AGG | CGA | CGC | CGG | CGU |
| Serine | Ser | S | AGC | AGU | UCA | UCC | UCG | UCU |
| Threonine | Thr | T | ACA | ACC | ACG | ACU | | |
| Valine | Val | V | GUA | GUC | GUG | GUU | | |
| Tryptophan | Trp | W | UGG | | | | | |
| Tyrosine | Tyr | Y | UAC | UAU | | | | |

[1073] In making such changes, the hydropathic index of amino acids may be considered. The importance of the hydropathic amino acid index in conferring interactive biologic function on a protein is generally understood in the art (Kyte and Doolittle, 1982, incorporated herein by reference). It is accepted that the relative hydropathic character of the amino acid contributes to the secondary structure of the resultant protein, which in turn defines the interaction of the protein with other molecules, for example, enzymes, substrates, receptors, DNA, antibodies, antigens, and the like. Each amino acid has been assigned a hydropathic index on the basis of its hydrophobicity and charge characteristics (Kyte and Doolittle, 1982). These values are: isoleucine (+4.5); valine (+4.2); leucine (+3.8); phenylalanine (+2.8); cysteine/cystine (+2.5); methionine (+1.9); alanine (+1.8); glycine (−0.4); threonine (−0.7); serine (−0.8); tryptophan (−0.9); tyrosine (−1.3); proline (−1.6); histidine (−3.2); glutamate (−3.5); glutamine (−3.5); aspartate (−3.5); asparagine (−3.5); lysine (−3.9); and arginine (−4.5).

[1074] It is known in the art that certain amino acids may be substituted by other amino acids having a similar hydropathic index or score and still result in a protein with similar biological activity, i.e. still obtain a biological functionally equivalent protein. In making such changes, the substitution of amino acids whose hydropathic indices are within ±2 is preferred, those within ±1 are particularly preferred, and those within ±0.5 are even more particularly preferred. It is also understood in the art that the substitution of like amino acids can be made effectively on the basis of hydrophilicity. U.S. Pat. No. 4,554,101 (specifically incorporated herein by reference in its entirety), states that the greatest local average hydrophilicity of a protein, as governed by the hydrophilicity of its adjacent amino acids, correlates with a biological property of the protein.

[1075] As detailed in U.S. Pat. No. 4,554,101, the following hydrophilicity values have been assigned to amino acid residues: arginine (+3.0); lysine (+3.0); aspartate (+3.0±1); glutamate (+3.0±1); serine (+0.3); asparagine (+0.2); glutarnine (+0.2); glycine (0); threonine (−0.4); proline (−0.5±1); alanine (−0.5); histidine (−0.5); cysteine (−1.0); methionine (−1.3); valine (−1.5); leucine (−1.8); isoleucine (−1.8); tyrosine (−2.3); phenylalanine (−2.5); tryptophan (−3.4). It is understood that an amino acid can be substituted for another having a similar hydrophilicity value and still obtain a biologically equivalent, and in particular, an immunologically equivalent protein. In such changes, the substitution of amino acids whose hydrophilicity values are within ±2 is preferred, those within ±1 are particularly preferred, and those within ±0.5 are even more particularly preferred.

[1076] As outlined above, amino acid substitutions are generally therefore based on the relative similarity of the amino acid side-chain substituents, for example, their hydrophobicity, hydrophilicity, charge, size, and the like. Exemplary substitutions that take various of the foregoing characteristics into consideration are well known to those of skill in the art and include: arginine and lysine; glutamate and aspartate; serine and threonine; glutamine and asparagine; and valine, leucine and isoleucine.

[1077] In addition, any polynucleotide may be further modified to increase stability in vivo. Possible modifications include, but are not limited to, the addition of flanking sequences at the 5′ and/or 3′ ends- the use of phosphorothioate or 2′ O-methyl rather than phosphodiesterase linkages in the backbone; and/or the inclusion of nontraditional bases such as inosine, queosine and wybutosine, as well as acetyl-methyl-, thio- and other modified forms of adenine, cytidine, guanine, thymine and uridine.

[1078] Amino acid substitutions may further be made on the basis of similarity in polarity, charge, solubility, hydrophobicity, hydrophilicity and/or the amphipathic nature of the residues. For example, negatively charged amino acids include aspartic acid and glutamic acid; positively charged amino acids include lysine and arginine; and amino acids with uncharged polar head groups having similar hydrophilicity values include leucine, isoleucine and valine; glycine and alanine; asparagine and glutamine; and serine, threonine, phenylalanine and tyrosine. Other groups of amino acids that may represent conservative changes include: (1) ala, pro, gly, glu, asp, gln, asn, ser, thr; (2) cys, ser, tyr, thr; (3) val, ile, leu, met, ala, phe; (4) lys, arg, his; and (5) phe, tyr, trp, his. A variant may also, or alternatively, contain nonconservative changes. In a preferred embodiment, variant polypeptides differ from a native sequence by substitution, deletion or addition of five amino acids or fewer. Variants may also (or alternatively) be modified by, for example, the deletion or addition of amino acids that have minimal influence on the immunogenicity, secondary structure and hydropathic nature of the polypeptide.

[1079] As noted above, polypeptides may comprise a signal (or leader) sequence at the N-termninal end of the protein, which co-translationally or post-translationally directs transfer of the protein. The polypeptide may also be conjugated to a linker or other sequence for ease of synthesis, purification or identification of the polypeptide (e.g. poly-His), or to enhance binding of the polypeptide to a solid support. For example, a polypeptide may be conjugated to an immunoglobulin Fc region.

[1080] When comparing polypeptide sequences, two sequences are said to be “identical” if the sequence of amino acids in the two sequences is the same when aligned for maximum correspondence, as described below. Comparisons between two sequences are typically performed by comparing the sequences over a comparison window to identify and compare local regions of sequence similarity. A “comparison window” as used herein, refers to a segment of at least about 20 contiguous positions, usually 30 to about 75, 40 to about 50, in which a sequence may be compared to a reference sequence of the same number of contiguous positions after the two sequences are optimally aligned.

[1081] Optimal alignment of sequences for comparison may be conducted using the Megalign program in the Lasergene suite of bioinformatics software (DNASTAR, Inc., Madison, WI), using default parameters. This program embodies several alignment schemes described in the following references: Dayhoff, M. O. (1978) A model of evolutionary change in proteins—Matrices for detecting distant relationships. In Dayhoff, M. O. (ed.) Atlas of Protein Sequence and Structure, National Biomedical Research Foundation, Washington DC Vol. 5, Suppl. 3, pp. 345-358; Hein J. (1990) Unified Approach to Alignment and Phylogenes pp. 626-645 Methods in Enzymology vol. 183, Academic Press, Inc., San Diego, Calif.; Higgins, D. G. and Sharp, P. M. (1989) CABIOS 5:151-153; Myers, E. W. and Muller W. (1988) CABIOS 4:11-17; Robinson, E. D. (1971) Comb. Theor 11:105; Santou, N. Nes, M. (1987) Mol. Biol. Evol. 4:406-425; Sneath, P. H. A. and Sokal, R. R. (1973) Numerical Taxonomy—the Principles and Practice of Numerical Taxonomy, Freeman Press, San Francisco, Calif.; Wilbur, W. J. and Lipman, D. J. (1983) Proc. Natl. Acad., Sci. USA 80:726-730.

[1082] Alternatively, optimal alignment of sequences for comparison may be conducted by the local identity algorithm of Smith and Waterman (1981) Add. APL. Math 2:482, by the identity alignment algorithm of Needleman and Wunsch (1970) J. Mol. Biol. 48:443, by the search for similarity methods of Pearson and Lipman (1988) Proc. Natl. Acad. Sci. USA 85: 2444, by computerized implementations of these algorithms (GAP, BESTFIT, BLAST, FASTA, and TFASTA in the Wisconsin Genetics Software Package, Genetics Computer Group (GCG), 575 Science Dr., Madison, Wis.), or by inspection.

[1083] One preferred example of algorithms that are suitable for determining percent sequence identity and sequence similarity are the BLAST and BLAST 2.0 algorithms, which are described in Altschul et al. (1977) Nucl. Acids Res. 25:3389-3402 and Altschul et al. (1990) J. Mol. Biol. 215:403-410, respectively. BLAST and BLAST 2.0 can be used, for example with the parameters described herein, to determine percent sequence identity for the polynucleotides and polypeptides of the invention. Software for performing BLAST analyses is publicly available through the National Center for Biotechnology Information. For amino acid sequences, a scoring matrix can be used to calculate the cumulative score. Extension of the word hits in each direction are halted when. the cumulative alignment score falls off by the quantity X from its maximum achieved value; the cumulative score goes to zero or below, due to the accumulation of one or more negative-scoring residue alignments; or the end of either sequence is reached. The BLAST algorithm parameters W, T and X determine the sensitivity and speed of the alignment.

[1084] In one preferred approach, the “percentage of sequence identity” is determined by comparing two optimally aligned sequences over a window of comparison of at least 20 positions, wherein the portion of the polypeptide sequence in the comparison window may comprise additions or deletions (i.e., gaps) of 20 percent or less, usually 5 to 15 percent, or 10 to 12 percent, as compared to the reference sequences (which does not comprise additions or deletions) for optimal alignment of the two sequences. The percentage is calculated by determining the number of positions at which the identical amino acid residue occurs in both sequences to yield the number of matched positions, dividing the number of matched positions by the total number of positions in the reference sequence (i.e., the window size) and multiplying the results by 100 to yield the percentage of sequence identity.

[1085] Within other illustrative embodiments, a polypeptide may be a fusion polypeptide that comprises multiple polypeptides as described herein, or that comprises at least one polypeptide as described herein and an unrelated sequence, such as a known tumor protein. A fusion partner may, for example, assist in providing T helper epitopes (an immunological fusion partner), preferably T helper epitopes recognized by humans, or may assist in expressing the protein (an expression enhancer) at higher yields than the native recombinant protein. Certain preferred fusion partners are both immunological and expression enhancing fusion partners. Other fusion partners may be selected so as to increase the solubility of the polypeptide or to enable the polypeptide to be targeted to desired intracellular compartments. Still further fusion partners include affinity tags, which facilitate purification of the polypeptide.

[1086] Fusion polypeptides may generally be prepared using standard techniques, including chemical conjugation. Preferably, a fusion polypeptide is expressed as a recombinant polypeptide, allowing the production of increased levels, relative to a non-fused polypeptide, in an expression system. Briefly, DNA sequences encoding the polypeptide components may be assembled separately, and ligated into an appropriate expression vector. The 3′ end of the DNA sequence encoding one polypeptide component is ligated, with or without a peptide linker, to the 5′ end of a DNA sequence encoding the second polypeptide component so that the reading frames of the sequences are in phase. This permits translation into a single fusion polypeptide that retains the biological activity of both component polypeptides.

[1087] A peptide linker sequence may be employed to separate the first and second polypeptide components by a distance sufficient to ensure that each polypeptide folds into its secondary and tertiary structures. Such a peptide linker sequence is incorporated into the fusion polypeptide using standard techniques well known in the art. Suitable peptide linker sequences may be chosen based on the following factors: (1) their ability to adopt a flexible extended conformation; (2) their inability to adopt a secondary structure that could interact with functional epitopes on the first and second polypeptides; and (3) the lack of hydrophobic or charged residues that might react with the polypeptide functional epitopes. Preferred peptide linker sequences contain Gly, Asn and Ser residues. Other near neutral amino acids, such as Thr and Ala may also be used in the linker sequence. Amino acid sequences which may be usefully employed as linkers include those disclosed in Maratea et al., Gene 40:39-46, 1985; Murphy et al., Proc. Nati. Acad. Sci. USA 83:8258-8262, 1986; U.S. Pat. No. 4,935,233 and U.S. Pat. No. 4,751,180. The linker sequence may generally be from 1 to about 50 amino acids in length. Linker sequences are not required when the first and second polypeptides have non-essential N-terminal amino acid regions that can be used to separate the functional domains and prevent steric interference.

[1088] The ligated DNA sequences are operably linked to suitable transcriptional or translational regulatory elements. The regulatory elements responsible for expression of DNA are located only 5′ to the DNA sequence encoding the first polypeptides. Similarly, stop codons required to end translation and transcription termination signals are only present 3′ to the DNA sequence encoding the second polypeptide.

[1089] The fusion polypeptide can comprise a polypeptide as described herein together with an unrelated immunogenic protein, such as an immunogenic protein capable of eliciting a recall response. Examples of such proteins include tetanus, tuberculosis and hepatitis proteins (see, for example, Stoute et al. New Engl. J. Med., 336:86-91, 1997).

[1090] In one preferred embodiment, the immunological fusion partner is derived from a Mycobacterium sp., such as a Mycobacterium tuberculosis-derived Ra12 fragment. Ra12 compositions and methods for their use in enhancing the expression and/or immunogenicity of heterologous polynucleotide/polypeptide sequences is described in U.S. patent application Ser. No. 60/158,585, the disclosure of which is incorporated herein by reference in its entirety. Briefly, Ra12 refers to a polynucleotide region that is a subsequence of a Mycobacterium tuberculosis MTB32A nucleic acid. MTB32A is a serine protease of 32 KD molecular weight encoded by a gene in virulent and avirulent strains of M. tuberculosis. The nucleotide sequence and amino acid sequence of MTB32A have been described (for example, U.S. patent application Ser. No. 60/158,585; see also, Skeiky et al., Infection and Immun. (1999) 67:3998-4007, incorporated herein by reference). Surprisingly, it was discovered that a 14 KD C-terminal fragment of the MTB32A coding sequence expresses at high levels on its own and remains as a soluble polypeptide throughout the purification process. Moreover, this fragment may enhance the immunogenicity of heterologous antigenic polypeptides with which it is fused. This 14 KD C-terminal fragment is referred to herein as Ra12 and represents a fragment comprising some or all of amino acid residues 192 to 323 of MTB32A.

[1091] Other preferred Ra12 polynucleotides generally comprise at least about 15 consecutive nucleotides, at least about 30 nucleotides, at least about 60 nucleotides, at least about 100 nucleotides, at least about 200 nucleotides, or at least about 300 nucleotides that encode a portion of a Ra12 polypeptide.

[1092] Ra12 polynucleotides may comprise a native sequence (ie., an endogenous sequence that encodes a Ra12 polypeptide or a portion thereof) or may comprise a variant of such a sequence. Ra12 polynucleotide variants may contain one or more substitutions, additions, deletions and/or insertions such that the biological activity of the encoded fusion polypeptide is not substantially diminished, relative to a fusion polypeptide comprising a native Ra12 polypeptide. Variants preferably exhibit at least about 70% identity, more preferably at least about 80% identity and most preferably at least about 90% identity to a polynucleotide sequence that encodes a native Ra12 polypeptide or a portion thereof.

[1093] Within other preferred embodiments, an immunological fusion partner is derived from protein D, a surface protein of the gram-negative bacterium Haemophilus influenza B (WO 91/18926). Preferably, a protein D derivative comprises approximately the first third of the protein (e.g., the first N-terminal 100-110 amino acids), and a protein D derivative may be lipidated. Within certain preferred embodiments, the first 109 residues of a Lipoprotein D fusion partner is included on the N-terminus to provide the polypeptide with additional exogenous T-cell epitopes and to increase the expression level in E. coli (thus functioning as an expression enhancer). The lipid tail ensures optimal presentation of the antigen to antigen presenting cells. Other fusion partners include the non-structural protein from influenzae virus, NS1 (hemaglutinin). Typically, the N-terminal 81 amino acids are used, although different fragments that include T-helper epitopes may be used.

[1094] In another embodiment, the immunological fusion partner is the protein known as LYTA, or a portion thereof (preferably a C-terminal portion). LYTA is derived from Streptococcus pneumoniae, which synthesizes an N-acetyl-L-alanine amidase known as amidase LYTA (encoded by the LytA gene; Gene 43:265-292, 1986). LYTA is an autolysin that specifically degrades certain bonds in the peptidoglycan backbone. The C-terminal domain of the LYTA protein is responsible for the affinity to the choline or to some choline analogues such as DEAE. This property has been exploited for the development of E. coli C-LYTA expressing plasmids useful for expression of fusion proteins. Purification of hybrid proteins containing the C-LYTA fragment at the amino terminus has been described (see Biotechnology 10:795-798, 1992). Within a preferred embodiment, a repeat portion of LYTA may be incorporated into a fusion polypeptide. A repeat portion is found in the C-terminal region starting at residue 178. A particularly preferred repeat portion incorporates residues 188-305.

[1095] Yet another illustrative embodiment involves fusion polypeptides, and the polynucleotides encoding them, wherein the fusion partner comprises a targeting signal capable of directing a polypeptide to the endosomal/lysosomal compartment, as described in U.S. Pat. No. 5,633,234. An immunogenic polypeptide of the invention, when fused with this targeting signal, will associate more efficiently with MHC class It molecules and thereby provide enhanced in vivo stimulation of CD4⁺ T-cells specific for the polypeptide.

[1096] Polypeptides of the invention are prepared using any of a variety of well known synthetic and/or recombinant techniques, the latter of which are further described below. Polypeptides, portions and other variants generally less than about 150 amino acids can be generated by synthetic means, using techniques well known to those of ordinary skill in the art. In one illustrative example, such polypeptides are synthesized using any of the commercially available solid-phase techniques, such as the Merrifield solid-phase synthesis method, where amino acids are sequentially added to a growing amino acid chain. See Merrifield, J. Am. Chem. Soc. 85:2149-2146, 1963. Equipment for automated synthesis of polypeptides is commercially available from suppliers such as Perkin Elmer/Applied BioSystems Division (Foster City, Calif.), and may be operated according to the manufacturer's instructions.

[1097] In general, polypeptide compositions (including fusion polypeptides) of the invention are isolated. An “isolated” polypeptide is one that is removed from its original environment. For example, a naturally-occurring protein or polypeptide is isolated if it is separated from some or all of the coexisting materials in the natural system. Preferably, such polypeptides are also purified, e.g., are at least about 90% pure, more preferably at least about 95% pure and most preferably at least about 99% pure.

[1098] Polynucleotide Compositions

[1099] The present invention, in other aspects, provides polynucleotide compositions. The terms “DNA” and “polynucleotide” are used essentially interchangeably herein to refer to a DNA molecule that has been isolated free of total genomic DNA of a particular species. “Isolated,” as used herein, means that a polynucleotide is substantially away from other coding sequences, and that the DNA molecule does not contain large portions of unrelated coding DNA, such as large chromosomal fragments or other functional genes or polypeptide coding regions. Of course, this refers to the DNA molecule as originally isolated, and does not exclude genes or coding regions later added to the segment by the hand of man.

[1100] As will be understood by those skilled in the art, the polynucleotide compositions of this invention can include genomic sequences, extra-genomic and plasmid-encoded sequences and smaller engineered gene segments that express, or may be adapted to express, proteins, polypeptides, peptides and the like. Such segments may be naturally isolated, or modified synthetically by the hand of man.

[1101] As will be also recognized by the skilled artisan, polynucleotides of the invention may be single-stranded (coding or antisense) or double-stranded, and may be DNA (genomic, cDNA or synthetic) or RNA molecules. RNA molecules may include HnRNA molecules, which contain introns and correspond to a DNA molecule in a one-to-one manner, and mRNA molecules, which do not contain introns. Additional coding or non-coding sequences may, but need not, be present within a polynucleotide of the present invention, and a polynucleotide may, but need not, be linked to other molecules and/or support materials.

[1102] Polynucleotides may comprise a native sequence (i.e., an endogenous sequence that encodes a polypeptide/protein of the invention or a portion thereof) or may comprise a sequence that encodes a variant or derivative, preferably and immunogenic variant or derivative, of such a sequence.

[1103] Therefore, according to another aspect of the present invention, polynucleotide compositions are provided that comprise some or all of a polynucleotide sequence set forth in any one of SEQ ID NOs: 1-57, 59-323, 341-782, 784-785, 788, 790, 792, 794, 796, 800-804, 807, 808, 810-826, 828-1664, 1668, 1669, 1676, 1680-1805, 1824, 1826-1829, 1865-1868, 1873, 1875, 1877, 1879, 1881, 1883, 1891-1900, 1910, 1914, 1918, 1922-1924, 1931, 1933, 1938, 1941 and 1974-2002, complements of a polynucleotide sequence set forth in any one of SEQ ID NOs: 1-57, 59-323, 341-782, 784-785, 788, 790, 792, 794, 796, 800-804, 807, 808, 810-826, 828-1664, 1668, 1669, 1676, 1680-1805, 1824, 1826-1829, 1865-1868, 1873, 1875, 1877, 1879, 1881, 1883, 1891-1900, 1910, 1914, 1918, 1922-1924, 1931, 1933, 1938, 1941 and 1974-2002, and degenerate variants of a polynucleotide sequence set forth in any one of SEQ ID NOs: 1-57, 59-323, 341-782, 784-785, 788, 790, 792, 794, 796, 800-804, 807, 808, 810-826, 828-1664, 1668, 1669, 1676, 1680-1805, 1824, 1826-1829, 1865-1868, 1873, 1875, 1877, 1879, 1881, 1883, 1891-1900, 1910, 1914, 1918, 1922-1924, 1931, 1933, 1938, 1941 and 1974-2002. In certain preferred embodiments, the polynucleotide sequences set forth herein encode immunogenic polypeptides, as described above.

[1104] In other related embodiments, the present invention provides polynucleotide variants having substantial identity to the sequences disclosed herein in SEQ ID NOs: 1-57, 59-323, 341-782, 784-785, 788, 790, 792, 794, 796, 800-804, 807, 808, 810-826, 828-1664, 1668, 1669, 1676, 1680-1805, 1824, 1826-1829, 1865-1868, 1873, 1875, 1877, 1879. 1881, 1883, 1891-1900, 1910, 1914, 1918, 1922-1924, 1931, 1933, 1938, 1941 and 1974-2002, for example those comprising at least 70% sequence identity, preferably at least 75%, 80%, 85%, 90%, 95%, 96%, 97%, 98%, or 99% or higher, sequence identity compared to a polynucleotide sequence of this invention using the methods described herein, (e.g., BLAST analysis using standard parameters, as described below). One skilled in this art will recognize that these values can be appropriately adjusted to determine corresponding identity of proteins encoded by two nucleotide sequences by taking into account codon degeneracy, amino acid similarity, reading frame positioning and the like.

[1105] Typically, polynucleotide variants will contain one or more substitutions, additions, deletions and/or insertions, preferably such that the immunogenicity of the polypeptide encoded by the variant polynucleotide is not substantially diminished relative to a polypeptide encoded by a polynucleotide sequence specifically set forth herein). The term “variants” should also be understood to encompasses homologous genes of xenogenic origin.

[1106] In additional embodiments, the present invention provides polynucleotide fragments comprising various lengths of contiguous stretches of sequence identical to or complementary to one or more of the sequences disclosed herein. For example, polynucleotides are provided by this invention that comprise at least about 10, 15, 20, 30, 40, 50, 75, 100, 150, 200, 300, 400, 500 or 1000 or more contiguous nucleotides of one or more of the sequences disclosed herein as well as all intermediate lengths there between. It will be readily understood that “intermediate lengths”, in this context, means any length between the quoted values, such as 16, 17, 18, 19, etc.; 21, 22, 23, etc.; 30, 31, 32, etc.; 50, 51, 52, 53, etc.; 100, 101, 102, 103, etc.; 150, 151, 152, 153, etc.; including all integers through 200-500; 500-1,000, and the like.

[1107] In another embodiment of the invention, polynucleotide compositions are provided that are capable of hybridizing under moderate to high stringency conditions to a polynucleotide sequence provided herein, or a fragment thereof, or a complementary sequence thereof. Hybridization techniques are well known in the art of molecular biology. For purposes of illustration, suitable moderately stringent conditions for testing the hybridization of a polynucleotide of this invention with other polynucleotides include prewashing in a solution of 5×SSC, 0.5% SDS, 1.0 mM EDTA (pH 8.0); hybridizing at 50° C.-60° C., 5×SSC, overnight; followed by washing twice at 65° C. for 20 minutes with each of 2×, 0.5× and 0.2×SSC containing 0.1% SDS. One skilled in the art will understand that the stringency of hybridization can be readily manipulated, such as by altering the salt content of the hybridization solution and/or the temperature at which the hybridization is performed. For example, in another embodiment, suitable highly stringent hybridization conditions include those described above, with the exception that the temperature of hybridization is increased, e.g., to 60-65° C. or 65-70° C.

[1108] In certain preferred embodiments, the polynucleotides described above, e.g., polynucleotide variants, fragments and hybridizing sequences, encode polypeptides that are immunologically cross-reactive with a polypeptide sequence specifically set forth herein. In other preferred embodiments, such polynucleotides encode polypeptides that have a level of immunogenic activity of at least about 50%, preferably at least about 70%, and more preferably at least about 90% of that for a polypeptide sequence specifically set forth herein.

[1109] The polynucleotides of the present invention, or fragments thereof, regardless of the length of the coding sequence itself, may be combined with other DNA sequences, such as promoters, polyadenylation signals, additional restriction enzyme sites, multiple cloning sites, other coding segments, and the like, such that their overall length may vary considerably. It is therefore contemplated that a nucleic acid fragment of almost any length may be employed, with the total length preferably being limited by the ease of preparation and use in the intended recombinant DNA protocol. For exarmple, illustrative polynucleotide segments with total lengths of about 10,000, about 5000, about 3000, about 2,000, about 1,000, about 500, about 200, about 100, about 50 base pairs in length, and the like, (including all intermediate lengths) are contemplated to be useful in many implementations of this invention.

[1110] When comparing polynucleotide sequences, two sequences are said to be “identical” if the sequence of nucleotides in the two sequences is the same when aligned for maximum correspondence, as described below. Comparisons between two sequences are typically performed by comparing the sequences over a comparison window to identify and compare local regions of sequence similarity. A “comparison window” as used herein, refers to a segment of at least about 20 contiguous positions, usually 30 to about 75, 40 to about 50, in which a sequence may be compared to a reference sequence of the same number of contiguous positions after the two sequences are optimally aligned.

[1111] Optimal alignment of sequences for comparison may be conducted using the Megalign program in the Lasergene suite of bioinformatics software (DNASTAR, Inc., Madison, Wis.), using default parameters. This program embodies several alignment schemes described in the following references: Dayhoff, M. O. (1978) A model of evolutionary change in proteins—Matrices for detecting distant relationships. In Dayhoff, M. O. (ed.) Atlas of Protein Sequence and Structure, National Biomedical Research Foundation, Washington D.C. Vol. 5, Suppl. 3, pp. 345-358; Hein J. (1990) Unified Approach to Alignment and Phylogenes pp. 626-645 Methods in Enzymology vol. 183, Academic Press, Inc., San Diego, Calif.; Higgins, D. G. and Sharp, P. M. (1989) CABIOS 5:151-153; Myers, E. W. and Muller W. (1988) CABIOS 4:11-17; Robinson, E. D. (1971) Comb. Theor 11:105; Santou, N. Nes, M. (1987) Mol. Biol. Evol. 4:406-425; Sneath, P. H. A. and Sokal, R. R. (1973) Numerical Taxonomy—the Principles and Practice of Numerical Taxonomy, Freeman Press, San Francisco, Calif.; Wilbur, W. J. and Lipman, D. J. (1 983) Proc. Natl. Acad., Sci. USA 80:726-730.

[1112] Alternatively, optimal alignment of sequences for comparison may be conducted by the local identity algorithm of Smith and Waterman (1981) Add. APL. Math 2:482, by the identity alignment algorithm of Needleman and Wunsch (1970) J. Mol. Biol. 48:443, by the search for similarity methods of Pearson and Lipman (1988) Proc. Natl. Acad. Sci. USA 85: 2444, by computerized implementations of these algorithms (GAP, BESTFIT, BLAST, FASTA, and TFASTA in the Wisconsin Genetics Software Package, Genetics Computer Group (GCG), 575 Science Dr., Madison, Wis.), or by inspection.

[1113] One preferred example of algorithms that are suitable for determining percent sequence identity and sequence similarity are the BLAST and BLAST 2.0 algorithms, which are described in Altschul et al. (1977) Nucl. Acids Res. 25:3389-3402 and Altschul et al. (1990) J. Mol. Biol. 215:403-410, respectively. BLAST and BLAST 2.0 can be used, for example with the parameters described herein, to determine percent sequence identity for the polynucleotides of the invention. Software for performing BLAST analyses is publicly available through the National Center for Biotechnology Information. In one illustrative example, cumulative scores can be calculated using, for nucleotide sequences, the parameters M (reward score for a pair of matching residues; always >0) and N (penalty score for mismatching residues; always <0). Extension of the word hits in each direction are halted when: the cumulative alignment score falls off by the quantity X from its maximum achieved value; the cumulative score goes to zero or below, due to the accumulation of one or more negative-scoring residue alignments; or the end of either sequence is reached. The BLAST algorithm parameters W, T and X determine the sensitivity and speed of the alignment. The BLASTN program (for nucleotide sequences) uses as defaults a wordlength (W) of 11, and expectation (E) of 10, and the BLOSUM62 scoring matrix (see Henikoff and Henikoff (1989) Proc. NatL. Acad. Sci. USA 89:10915) alignments, (B) of 50, expectation (E) of 10, M=5, N=−4 and a comparison of both strands.

[1114] Preferably, the “percentage of sequence identity” is determined by comparing two optimally aligned sequences over a window of comparison of at least 20 positions, wherein the portion of the polynucleotide sequence in the comparison window may comprise additions or deletions (i.e., gaps) of 20 percent or less, usually 5 to 15 percent, or 10 to 12 percent, as compared to the reference sequences (which does not comprise additions or deletions) for optimal alignment of the two sequences. The percentage is calculated by determining the number of positions at which the identical nucleic acid bases occurs in both sequences to yield the number of matched positions, dividing the number of matched positions by the total number of positions in the reference sequence (i.e., the window size) and multiplying the results by 100 to yield the percentage of sequence identity.

[1115] It will be appreciated by those of ordinary skill in the art that, as a result of the degeneracy of the genetic code, there are many nucleotide sequences that encode a polypeptide as described herein. Some of these polynucleotides bear minimal homology to the nucleotide sequence of any native gene. Nonetheless, polynucleotides that vary due to differences in codon usage are specifically contemplated by the present invention. Further, alleles of the genes comprising the polynucleotide sequences provided herein are within the scope of the present invention. Alleles are endogenous genes that are altered as a result of one or more mutations, such as deletions, additions and/or substitutions of nucleotides. The resulting mRNA and protein may, but need not, have an altered structure or function. Alleles may be identified using standard techniques (such as hybridization, amplification and/or database sequence comparison).

[1116] Therefore, in another embodiment of the invention, a mutagenesis approach, such as site-specific mutagenesis, is employed for the preparation of immunogenic variants and/or derivatives of the polypeptides described herein. By this approach, specific modifications in a polypeptide sequence can be made through mutagenesis of the underlying polynucleotides that encode them. These techniques provides a straightforward approach to prepare and test sequence variants, for example, incorporating one or more of the foregoing considerations, by introducing one or more nucleotide sequence changes into the polynucleotide.

[1117] Site-specific mutagenesis allows the production of mutants through the use of specific oligonucleotide sequences which encode the DNA sequence of the desired mutation, as well as a sufficient number of adjacent nucleotides, to provide a primer sequence of sufficient size and sequence complexity to form a stable duplex on both sides of the deletion junction being traversed. Mutations may be employed in a selected polynucleotide sequence to improve, alter, decrease, modify, or otherwise change the properties of the polynucleotide itself, and/or alter the properties, activity, composition, stability, or primary sequence of the encoded polypeptide.

[1118] In certain embodiments of the present invention, the inventors contemplate the mutagenesis of the disclosed polynucleotide sequences to alter one or more properties of the encoded polypeptide, such as the immunogenicity of a polypeptide vaccine. The techniques of site-specific mutagenesis are well-known in the art, and are widely used to create variants of both polypeptides and polynucleotides. For example, site-specific mutagenesis is often used to alter a specific portion of a DNA molecule. In such embodiments, a primer comprising typically about 14 to about 25 nucleotides or so in length is employed, with about 5 to about 10 residues on both sides of the junction of the sequence being altered.

[1119] As will be appreciated by those of skill in the art, site-specific mutagenesis techniques have often employed a phage vector that exists in both a single stranded and double stranded form. Typical vectors useful in site-directed mutagenesis include vectors such as the M13 phage. These phage are readily commercially-available and their use is generally well-known to those skilled in the art. Double-stranded plasmids are also routinely employed in site directed mutagenesis that eliminates the step of transferring the gene of interest from a plasmid to a phage.

[1120] In general, site-directed mutagenesis in accordance herewith is performed by first obtaining a single-stranded vector or melting apart of two strands of a double-stranded vector that includes within its sequence a DNA sequence that encodes the desired peptide. An oligonucleotide primer bearing the desired mutated sequence is prepared, generally synthetically. This primer is then annealed with the single-stranded vector, and subjected to DNA polymerizing enzymes such as E. coli polymerase I Klenow fragment, in order to complete the synthesis of the mutation-bearing strand. Thus, a heteroduplex is formed wherein one strand encodes the original non-mutated sequence and the second strand bears the desired mutation. This heteroduplex vector is then used to transform appropriate cells, such as E. coli cells, and clones are selected which include recombinant vectors bearing the mutated sequence arrangement.

[1121] The preparation of sequence variants of the selected peptide-encoding DNA segments using site-directed mutagenesis provides a means of producing potentially useful species and is not meant to be limiting as there are other ways in which sequence variants of peptides and the DNA sequences encoding them may be obtained. For example, recombinant vectors encoding the desired peptide sequence may be treated with mutagenic agents, such as hydroxylamine, to obtain sequence variants. Specific details regarding these methods and protocols are found in the teachings of Maloy et al., 1994; Segal, 1976; Prokop and Bajpai, 1991; Kuby, 1994; and Maniatis et al., 1982, each incorporated herein by reference, for that purpose.

[1122] As used herein, the term “oligonucleotide directed mutagenesis procedure” refers to template-dependent processes and vector-mediated propagation which result in an increase in the concentration of a specific nucleic acid molecule relative to its initial concentration, or in an increase in the concentration of a detectable signal, such as amplification. As used herein, the term “oligonucleotide directed mutagenesis procedure” is intended to refer to a process that involves the template-dependent extension of a primer molecule. The term template dependent process refers to nucleic acid synthesis of an RNA or a DNA molecule wherein the sequence of the newly synthesized strand of nucleic acid is dictated by the well-known rules of complementary base pairing (see, for example, Watson, 1987). Typically, vector mediated methodologies involve the introduction of the nucleic acid fragment into a DNA or RNA vector, the clonal amplification of the vector, and the recovery of the amplified nucleic acid fragment. Examples of such methodologies are provided by U.S. Pat. No. 4,237,224, specifically incorporated herein by reference in its entirety.

[1123] In another approach for the production of polypeptide variants of the present invention, recursive sequence recombination, as described in U.S. Pat. No. 5,837,458, may be employed. In this approach, iterative cycles of recombination and screening or selection are performed to “evolve” individual polynucleotide variants of the invention having, for example, enhanced immunogenic activity.

[1124] In other embodiments of the present invention, the polynucleotide sequences provided herein can be advantageously used as probes or primers for nucleic acid hybridization. As such, it is contemplated that nucleic acid segments that comprise a sequence region of at least about 15 nucleotide long contiguous sequence that has the same sequence as, or is complementary to, a 15 nucleotide long contiguous sequence disclosed herein will find particular utility. Longer contiguous identical or complementary sequences, e.g., those of about 20, 30, 40, 50, 100, 200, 500, 1000 (including all intermediate lengths) and even up to full length sequences will also be of use in certain embodiments.

[1125] The ability of such nucleic acid probes to specifically hybridize to a sequence of interest will enable them to be of use in detecting the presence of complementary sequences in a given sample. However, other uses are also envisioned, such as the use of the sequence information for the preparation of mutant species primers, or primers for use in preparing other genetic constructions.

[1126] Polynucleotide molecules having sequence regions consisting of contiguous nucleotide stretches of 10-14, 15-20, 30, 50, or even of 100-200 nucleotides or so (including intermediate lengths as well), identical or complementary to a polynucleotide sequence disclosed herein, are particularly contemplated as hybridization probes for use in, e.g., Southern and Northern blotting. This would allow a gene product, or fragment thereof, to be analyzed, both in diverse cell types and also in various bacterial cells. The total size of fragment, as well as the size of the complementary stretch(es), will ultimately depend on the intended use or application of the particular nucleic acid segment. Smaller fragments will generally find use in hybridization embodiments, wherein the length of the contiguous complementary region may be varied, such as between about 15 and about 100 nucleotides, but larger contiguous complementarity stretches may be used, according to the length complementary sequences one wishes to detect.

[1127] The use of a hybridization probe of about 15-25 nucleotides in length allows the formation of a duplex molecule that is both stable and selective. Molecules having contiguous complementary sequences over stretches greater than 15 bases in length are generally preferred, though, in order to increase stability and selectivity of the hybrid, and thereby improve the quality and degree of specific hybrid molecules obtained. One will generally prefer to design nucleic acid molecules having gene-complementary stretches of 15 to 25 contiguous nucleotides, or even longer where desired.

[1128] Hybridization probes may be selected from any portion of any of the sequences disclosed herein. All that is required is to review the sequences set forth herein, or to any continuous portion of the sequences, from about 15-25 nucleotides in length up to and including the full length sequence, that one wishes to utilize as a probe or primer. The choice of probe and primer sequences may be governed by various factors. For example, one may wish to employ primers from towards the termini of the total sequence.

[1129] Small polynucleotide segments or fragments may be readily prepared by, for example, directly synthesizing the fragment by chemical means, as is commonly practiced using an automated oligonucleotide synthesizer. Also, fragments may be obtained by application of nucleic acid reproduction technology, such as the PCR™ technology of U.S. Pat. No. 4,683,202 (incorporated herein by reference), by introducing selected sequences into recombinant vectors for recombinant production, and by other recombinant DNA techniques generally known to those of skill in the art of molecular biology.

[1130] The nucleotide sequences of the invention may be used for their ability to selectively form duplex molecules with complementary stretches of the entire gene or gene fragments of interest. Depending on the application envisioned, one will typically desire to employ varying conditions of hybridization to achieve varying degrees of selectivity of probe towards target sequence. For applications requiring high selectivity, one will typically desire to employ relatively stringent conditions to form the hybrids, e.g., one will select relatively low salt and/or high temperature conditions, such as provided by a salt concentration of from about 0.02 M to about 0.15 M salt at temperatures of from about 50° C. to about 70° C. Such selective conditions tolerate little, if any, mismatch between the probe and the template or target strand, and would be particularly suitable for isolating related sequences.

[1131] Of course, for some applications, for example, where one desires to prepare mutants employing a mutant primer strand hybridized to an underlying template, less stringent (reduced stringency) hybridization conditions will typically be needed in order to allow formation of the heteroduplex. In these circumstances, one may desire to employ salt conditions such as those of from about 0.15 M to about 0.9 M salt, at temperatures ranging from about 20° C. to about 55° C. Cross-hybridizing species can thereby be readily identified as positively hybridizing signals with respect to control hybridizations. In any case, it is generally appreciated that conditions can be rendered more stringent by the addition of increasing amounts of formamide, which serves to destabilize the hybrid duplex in the same manner as increased temperature. Thus, hybridization conditions can be readily manipulated, and thus will generally be a method of choice depending on the desired results.

[1132] According to another embodiment of the present invention, polynucleotide compositions comprising antisense oligonucleotides are provided. Antisense oligonucleotides have been demonstrated to be effective and targeted inhibitors of protein synthesis, and, consequently, provide a therapeutic approach by which a disease can be treated by inhibiting the synthesis of proteins that contribute to the disease. The efficacy of antisense oligonucleotides for inhibiting protein synthesis is well established. For example, the synthesis of polygalactauronase and the muscarine type 2 acetylcholine receptor are inhibited by antisense oligonucleotides directed to their respective mRNA sequences (U.S. Pat. No. 5,739,119 and U.S. Pat. No. 5,759,829). Further, examples of antisense inhibition have been demonstrated with the nuclear protein cyclin, the multiple drug resistance gene (MDG1), ICAM-1, E-selectin, STK-1, striatal GABA_{A} receptor and human EGF (Jaskulski et al., Science. Jun. 10, 1988;240(4858):1544-6; Vasanthakumar and Ahmed, Cancer Commun. 1989;1(4):225-32; Peris etal., Brain Res Mol Brain Res. Jun. 15, 1998;57(2):310-20; U.S. Pat. No. 5,801,154; U.S. Pat. No. 5,789,573; U.S. Pat. No. 5,718,709 and U.S. Pat. No. 5,610,288). Antisense constructs have also been described that inhibit and can be used to treat a variety of abnormal cellular proliferations, e.g cancer (U.S. Pat. No. 5,747,470; U.S. Pat. No. 5,591,317 and U.S. Pat. No. 5,783,683).

[1133] Therefore, in certain embodiments, the present invention provides oligonucleotide sequences that comprise all, or a portion of, any sequence that is capable of specifically binding to polynucleotide sequence described herein, or a complement thereof. In one embodiment, the antisense oligonucleotides comprise DNA or derivatives thereof. In another embodiment, the oligonucleotides comprise RNA or derivatives thereof. In a third embodiment, the oligonucleotides are modified DNAs comprising a phosphorothioated modified backbone. In a fourth embodiment, the oligonucleotide sequences comprise peptide nucleic acids or derivatives thereof. In each case, preferred compositions comprise a sequence region that is complementary, and more preferably substantially-complementary, and even more preferably, completely complementary to one or more portions of polynucleotides disclosed herein. Selection of antisense compositions specific for a given gene sequence is based upon analysis of the chosen target sequence and determination of secondary structure, Tₘ, binding energy, and relative stability. Antisense compositions may be selected based upon their relative inability to form dimers, hairpins, or other secondary structures that would reduce or prohibit specific binding to the target mRNA in a host cell. Highly preferred target regions of the mRNA, are those which are at or near the AUG translation initiation codon, and those sequences which are substantially complementary to 5′ regions of the mRNA. These secondary structure analyses and target site selection considerations can be performed, for example, using v.4 of the OLIGO primer analysis software and/or the BLASTN 2.0.5 algorithm software (Altschul et al., Nucleic Acids Res. 1997, 25(17):3389-402).

[1134] The use of an antisense delivery method employing a short peptide vector, termed MPG (27 residues), is also contemplated. The MPG peptide contains a hydrophobic domain derived from the fusion sequence of HIV gp41 and a hydrophilic domain from the nuclear localization sequence of SV40 T-antigen (Morris et al., Nucleic Acids Res. Jul. 15, 1997;25(14):2730-6). It has been demonstrated that several molecules of the MPG peptide coat the antisense oligonucleotides and can be delivered into cultured mammalian cells in less than 1 hour with relatively high efficiency (90%). Further, the interaction with MPG strongly increases both the stability of the oligonucleotide to nuclease and the ability to cross the plasma membrane.

[1135] According to another embodiment of the invention, the polynucleotide compositions described herein are used in the design and preparation of ribozyme molecules for inhibiting expression of the tumor polypeptides and proteins of the present invention in tumor cells. Ribozymes are RNA-protein complexes that cleave nucleic acids in a site-specific fashion. Ribozymes have specific catalytic domains that possess endonuclease activity (Kim and Cech, Proc Natl Acad Sci USA. 1987 December;84(24):8788-92; Forster and Symons, Cell. Apr. 24, 1987;49(2):211-20). For example, a large number of ribozymes accelerate phosphoester transfer reactions with a high degree of specificity, often cleaving only one of several phosphoesters in an oligonucleotide substrate (Cech et al., Cell. Dec. 27, 1981 (3 Pt 2):487-96; Michel and Westhof, J. Mol. Biol. 1990 December 5;216(3):585-610; Reinhold-Hurek and Shub, Nature. May 14, 1992;357(6374):173-6). This specificity has been attributed to the requirement that the substrate bind via specific base-pairing interactions to the internal guide sequence (“IGS”) of the ribozyme prior to chemical reaction.

[1136] Six basic varieties of naturally-occurring enzymatic RNAs are known presently. Each can catalyze the hydrolysis of RNA phosphodiester bonds in trans (and thus can cleave other RNA molecules) under physiological conditions. In general, enzymatic nucleic acids act by first binding to a target RNA. Such binding occurs through the target binding portion of a enzymatic nucleic acid which is held in close proximity to an enzymatic portion of the molecule that acts to cleave the target RNA. Thus, the enzymatic nucleic acid first recognizes and then binds a target RNA through complementary base-pairing, and once bound to the correct site, acts enzymatically to cut the target RNA. Strategic cleavage of such a target RNA will destroy its ability to direct synthesis of an encoded protein. After an enzymatic nucleic acid has bound and cleaved its RNA target, it is released from that RNA to search for another target and can repeatedly bind and cleave new targets.

[1137] The enzymatic nature of a ribozyme is advantageous over many technologies, such as antisense technology (where a nucleic acid molecule simply binds to a nucleic acid target to block its translation) since the concentration of ribozyme necessary to affect a therapeutic treatment is lower than that of an antisense oligonucleotide. This advantage reflects the ability of the ribozyme to act enzymatically. Thus, a single ribozyme molecule is able to cleave many molecules of target RNA. In addition, the ribozyme is a highly specific inhibitor, with the specificity of inhibition depending not only on the base pairing mechanism of binding to the target RNA, but also on the mechanism of target RNA cleavage. Single mismatches, or base-substitutions, near the site of cleavage can completely eliminate catalytic activity of a ribozyme. Similar mismatches in antisense molecules do not prevent their action (Woolf et al., Proc Natl Acad Sci USA. Aug. 15, 1992;89(16):7305-9). Thus, the specificity of action of a ribozyme is greater than that of an antisense oligonucleotide binding the same RNA site.

[1138] The enzymatic nucleic acid molecule may be formed in a hammerhead, hairpin, a hepatitis δ virus, group I intron or RNaseP RNA (in association with an RNA guide sequence) or Neurospora VS RNA motif. Examples of hammerhead motifs are described by Rossi et al. Nucleic Acids Res. Sep. 11, 1992;20(17):4559-65. Examples of hairpin motifs are described by Hampel et al. (Eur. Pat. Appl. Publ. No. EP 0360257), Hampel and Tritz, Biochemistry Jun. 13, 1989;28(12):4929-33; Hampel et al., Nucleic Acids Res. Jan. 25, 1990;18(2):299-304 and U.S. Pat. No. 5,631,359. An example of the hepatitis δ virus motif is described by Perrotta and Been, Biochemistry. Dec. 1, 1992;31(47): 11843-52; an example of the RNaseP motif is described by Guerrier-Takada et al., Cell. Dec. 35, 1983(3 Pt 2):849-57; Neurospora VS RNA ribozyme motif is described by Collins (Saville and Collins, Cell. May 18, 1990;61(4):685-96; Saville and Collins, Proc Natl Acad Sci USA. Oct. 1, 1991;88(19):8826-30; Collins and Olive, Biochemistry. Mar. 23, 1993;32(11):2795-9); and an example of the Group I intron is described in (U.S. Pat. No. 4,987,071). All that is important in an enzymatic nucleic acid molecule of this invention is that it has a specific substrate binding site which is complementary to one or more of the target gene RNA regions, and that it have nucleotide sequences within or surrounding that substrate binding site which impart an RNA cleaving activity to the molecule. Thus the ribozyme constructs need not be limited to specific motifs mentioned herein.

[1139] Ribozymes may be designed as described in Int. Pat. Appl. Publ. No. WO 93/23569 and Int. Pat. Appl. Publ. No. WO 94/02595, each specifically incorporated herein by reference) and synthesized to be tested in vitro and in vivo, as described. Such ribozymes can also be optimized for delivery. While specific examples are provided, those in the art will recognize that equivalent RNA targets in other species can be utilized when necessary.

[1140] Ribozyme activity can be optimized by altering the length of the ribozyme binding arms, or chemically synthesizing ribozymes with modifications that prevent their degradation by serum ribonucleases (see e.g., Int. Pat. Appl. Publ. No. WO 92/07065; Int. Pat. Appl. Publ. No. WO 93/15187; int. Pat. Appl. Publ. No. WO 91/03162; Eur. Pat. Appl. Publ. No. 92110298.4; U.S. Pat. No. 5,334,711; and Int. Pat. Appl. Publ. No. WO 94/13688, which describe various chemical modifications that can be made to the sugar moieties of enzymatic RNA molecules), modifications which enhance their efficacy in cells, and removal of stem II bases to shorten RNA synthesis times and reduce chemical requirements.

[1141] Sullivan et al. (Int. Pat. Appl. Publ. No. WO 94/02595) describes the general methods for delivery of enzymatic RNA molecules. Ribozymes may be administered to cells by a variety of methods known to those familiar to the art, including, but not restricted to, encapsulation in liposomes, by iontophoresis, or by incorporation into other vehicles, such as hydrogels, cyclodextrins, biodegradable nanocapsules, and bioadhesive microspheres. For some indications, ribozymes may be directly delivered ex vivo to cells or tissues with or without the aforementioned vehicles. Alternatively, the RNA/vehicle combination may be locally delivered by direct inhalation, by direct injection or by use of a catheter, infusion pump or stent. Other routes of delivery include, but are not limited to, intravascular, intramuscular, subcutaneous or joint injection, aerosol inhalation, oral (tablet or pill form), topical, systemic, ocular, intraperitoneal and/or intrathecal delivery. More detailed descriptions of ribozyme delivery and administration are provided in Int. Pat. Appl. Publ. No. WO 94/02595 and Int. Pat. Appl. Publ. No. WO 93/23569, each specifically incorporated herein by reference.

[1142] Another means of accumulating high concentrations of a ribozyme(s) within cells is to incorporate the ribozyme-encoding sequences into a DNA expression vector. Transcription of the ribozyme sequences are driven from a promoter for eukaryotic RNA polymerase I (pol I), RNA polymerase II (pol II), or RNA polymerase III (pol III). Transcripts from pol II or pol III promoters will be expressed at high levels in all cells; the levels of a given pol II promoter in a given cell type will depend on the nature of the gene regulatory sequences (enhancers, silencers, etc.) present nearby. Prokaryotic RNA polymerase promoters may also be used, providing that the prokaryotic RNA polymerase enzyme is expressed in the appropriate cells Ribozymes expressed from such promoters have been shown to function in mammalian cells. Such transcription units can be incorporated into a variety of vectors for introduction into mammalian cells, including but not restricted to, plasmid DNA vectors, viral DNA vectors (such as adenovirus or adeno-associated vectors), or viral RNA vectors (such as retroviral, semliki forest virus, sindbis virus vectors).

[1143] In another embodiment of the invention, peptide nucleic acids (PNAs) compositions are provided. PNA is a DNA mimic in which the nucleobases are attached to a pseudopeptide backbone (Good and Nielsen, Antisense Nucleic Acid Drug Dev. 1997 7(4) 431-37). PNA is able to be utilized in a number methods that traditionally have used RNA or DNA. Often PNA sequences perform better in techniques than the corresponding RNA or DNA sequences and have utilities that are not inherent to RNA or DNA. A review of PNA including methods of making, characteristics of, and methods of using, is provided by Corey (Trends Biotechnol Jun. 15, 1997(6):224-9). As such, in certain embodiments, one may prepare PNA sequences that are complementary to one or more portions of the ACE mRNA sequence, and such PNA compositions may be used to regulate, alter, decrease, or reduce the translation of ACE-specific mRNA, and thereby alter the level of ACE activity in a host cell to which such PNA compositions have been administered.

[1144] PNAs have 2-aminoethyl-glycine linkages replacing the normal phosphodiester backbone of DNA (Nielsen et al., Science Dec. 6, 1991;254(5037):1497-500; Hanvey et al., Science. Nov. 27, 1992;258(5087):1481-5; Hyrup and Nielsen, Bioorg Med Chem. Jan.4, 1996(1):5-23). This chemistry has three important consequences: firstly, in contrast to DNA or phosphorothioate oligonucleotides, PNAs are neutral molecules; secondly, PNAs are achiral, which avoids the need to develop a stereoselective synthesis; and thirdly, PNA synthesis uses standard Boc or Fmoc protocols for solid-phase peptide synthesis, although other methods, including a modified Merrifield method, have been used.

[1145] PNA monomers or ready-made oligomers are commercially available from PerSeptive Biosystems (Framingham, Mass.). PNA syntheses by either Boc or Fmoc protocols are straightforward using manual or automated protocols (Norton et al., Bioorg Med Chem. Apr. 3, 1995(4):437-45). The manual protocol lends itself to the production of chemically modified PNAs or the simultaneous synthesis of families of closely related PNAs.

[1146] As with peptide synthesis, the success of a particular PNA synthesis will depend on the properties of the chosen sequence. For example, while in theory PNAs can incorporate any combination of nucleotide bases, the presence of adjacent purines can lead to deletions of one or more residues in the product. In expectation of this difficulty, it is suggested that, in producing PNAs with adjacent purines, one should repeat the coupling of residues likely to be added inefficiently. This should be followed by the purification of PNAs by reverse-phase high-pressure liquid chromatography, providing yields and purity of product similar to those observed during the synthesis of peptides.

[1147] Modifications of PNAs for a given application may be accomplished by coupling amino acids during solid-phase synthesis or by attaching compounds that contain a carboxylic acid group to the exposed N-terminal amine. Alternatively, PNAs can be modified after synthesis by coupling to an introduced lysine or cysteine. The ease with which PNAs can be modified facilitates optimization for better solubility or for specific functional requirements. Once synthesized, the identity of PNAs and their derivatives can be confirmed by mass spectrometry. Several studies have made and utilized modifications of PNAs (for example, Norton et al, Bioorg Med Chem. Apr. 3, 1995(4):437-45; Petersen et al., J Pept Sci. May-Jun. 1, 1995(3):175-83; Orum et aL, Biotechniques. Sep. 19, 1995(3):472-80; Footer et al., Biochemistry. Aug. 20, 1996;35(33):10673-9; Griffith et al., Nucleic Acids Res. Aug. 11, 1995;23(15):3003-8; Pardridge et al., Proc Natl Acad Sci USA. Jun. 6, 1995;92(12):5592-6; Boffa et al., Proc Natl Acad Sci USA. Mar. 14, 1995;92(6):1901-5; Gambacorti-Passerini et al., Blood. Aug. 15, 1996;88(4):1411-7; Armitage et al., Proc Natl Acad Sci USA. Nov. 11, 1997;94(23):12320-5; Seeger et al., Biotechniques. Sep. 23, 1997(3):512-7). U.S. Pat. No. 5,700,922 discusses PNA-DNA-PNA chimeric molecules and their uses in diagnostics, modulating protein in organisms, and treatment of conditions susceptible to therapeutics.

[1148] Methods of characterizing the antisense binding properties of PNAs are discussed in Rose (Anal Chem. Dec. 15, 1993;65(24):3545-9) and Jensen et al. (Biochemistry. Apr. 22, 1997;36(16):5072-7). Rose uses capillary gel electrophoresis to determine binding of PNAs to their complementary oligonucleotide, measuring the relative binding kinetics and stoichiometry. Similar types of measurements were made by Jensen et al. using BlAcore™ technology.

[1149] Other applications of PNAs that have been described and will be apparent to the skilled artisan include use in DNA strand invasion, antisense inhibition, mutational analysis, enhancers of transcription, nucleic acid purification, isolation of transcriptionally active genes, blocking of transcription factor binding, genome cleavage, biosensors, in situ hybridization, and the like.

[1150] Polynucleotide Identification, Characterization and Expression

[1151] Polynucleotides compositions of the present invention may be identified, prepared and/or manipulated using any of a variety of well established techniques (see generally, Sambrook et al., Molecular Cloning: A Laboratory Manual, Cold Spring Harbor Laboratories, Cold Spring Harbor, N.Y., 1989, and other like references). For example, a polynucleotide may be identified, as described in more detail below, by screening a microarray of cDNAs for tumor-associated expression (i.e., expression that is at least two fold greater in a tumor than in normal tissue, as determined using a representative assay provided herein). Such screens may be performed, for example, using the microarray technology of Affymetrix, Inc. (Santa Clara, Calif.) according to the manufacturer's instructions (and essentially as described by Schena et al., Proc. Natl. Acad. Sci. USA 93:10614-10619, 1996 and Heller et al., Proc. Natl. Acad. Sci. USA 94:2150-2155, 1997). Alternatively, polynucleotides may be amplified from cDNA prepared from cells expressing the proteins described herein, such as tumor cells.

[1152] Many template dependent processes are available to amplify a target sequences of interest present in a sample. One of the best known amplification methods is the polymerase chain reaction (PCR™) which is described in detail in U.S. Pat. Nos. 4,683,195, 4,683,202 and 4,800,159, each of which is incorporated herein by reference in its entirety. Briefly, in PCR™, two primer sequences are prepared which are complementary to regions on opposite complementary strands of the target sequence. An excess of deoxynucleoside triphosphates is added to a reaction mixture along with a DNA polymerase (e.g. Taq polymerase). If the target sequence is present in a sample, the primers will bind to the target and the polymerase will cause the primers to be extended along the target sequence by adding on nucleotides. By raising and lowering the temperature of the reaction mixture, the extended primers will dissociate from the target to form reaction products, excess primers will bind to the target and to the reaction product and the process is repeated. Preferably reverse transcription and PCR™ amplification procedure may be performed in order to quantify the amount of mRNA amplified. Polymerase chain reaction methodologies are well known in the art.

[1153] Any of a number of other template dependent processes, many of which are variations of the PCR™ amplification technique, are readily known and available in the art. Illustratively, some such methods include the ligase chain reaction (referred to as LCR), described, for example, in Eur. Pat. Appl. Publ. No. 320,308 and U.S. Pat. No. 4,883,750; Qbeta Replicase, described in PCT Intl. Pat. Appl. Publ. No. PCT/US87/00880; Strand Displacement Amplification (SDA) and Repair Chain Reaction (RCR). Still other amplification methods are described in Great Britain Pat. Appl. No. 2 202 328, and in PCT Intl. Pat. Appl. Publ. No. PCT/US89/01025. Other nucleic acid amplification procedures include transcription-based amplification systems (TAS) (PCT Intl. Pat. Appl. Publ. No. WO 88/10315), including nucleic acid sequence based amplification (NASBA) and 3SR. Eur. Pat. Appl. Publ. No. 329,822 describes a nucleic acid amplification process involving cyclically synthesizing single-stranded RNA (“ssRNA”), ssDNA, and double-stranded DNA (dsDNA). PCT Intl. Pat. Appl. Publ. No. WO 89/06700 describes a nucleic acid sequence amplification scheme based on the hybridization of a promoter/primer sequence to a target single-stranded DNA (“ssDNA”) followed by transcription of many RNA copies of the sequence. Other amplification methods such as “RACE” (Frohman, 1990), and “one-sided PCR” (Ohara, 1989) are also well-known to those of skill in the art.

[1154] An amplified portion of a polynucleotide of the present invention may be used to isolate a full length gene from a suitable library (e.g., a tumor cDNA library) using well known techniques. Within such techniques, a library (cDNA or genomic) is screened using one or more polynucleotide probes or primers suitable for amplification. Preferably, a library is size-selected to include larger molecules. Random primed libraries may also be preferred for identifying 5′ and upstream regions of genes. Genomic libraries are preferred for obtaining introns and extending 5′ sequences.

[1155] For hybridization techniques, a partial sequence may be labeled (e.g., by nick-translation or end-labeling with ³²p) using well known techniques. A bacterial or bacteriophage library is then generally screened by hybridizing filters containing denatured bacterial colonies (or lawns containing phage plaques) with the labeled probe (see Sambrook et al., Molecular Cloning: A Laboratory Manual, Cold Spring Harbor Laboratories, Cold Spring Harbor, N.Y., 1989). Hybridizing colonies or plaques are selected and expanded, and the DNA is isolated for further analysis. cDNA clones may be analyzed to determine the amount of additional sequence by, for example, PCR using a primer from the partial sequence and a primer from the vector. Restriction maps and partial sequences may be generated to identify one or more overlapping clones. The complete sequence may then be determined using standard techniques, which may involve generating a series of deletion clones. The resulting overlapping sequences can then assembled into a single contiguous sequence. A full length cDNA molecule can be generated by ligating suitable fragments, using well known techniques.

[1156] Alternatively, amplification techniques, such as those described above, can be useful for obtaining a full length coding sequence from a partial cDNA sequence. One such amplification technique is inverse PCR (see Triglia et al., Nucl Acids Res. 16:8186, 1988), which uses restriction enzymes to generate a fragment in the known region of the gene. The fragment is then circularized by intramolecular ligation and used as a template for PCR with divergent primers derived from the known region. Within an alternative approach, sequences adjacent to a partial sequence may be retrieved by amplification with a primer to a linker sequence and a primer specific to a known region. The amplified sequences are typically subjected to a second round of amplification with the same linker primer and a second primer specific to the known region. A variation on this procedure, which employs two primers that initiate extension in opposite directions from the known sequence, is described in WO 96/38591. Another such technique is known as “rapid amplification of cDNA ends” or RACE. This technique involves the use of an internal primer and an external primer, which hybridizes to a polyA region or vector sequence, to identify sequences that are 5′ and 3′ of a known sequence. Additional techniques include capture PCR (Lagerstrom et al., PCR Methods Applic. 1:111-19, 1991) and walking PCR (Parker et al., NucL Acids. Res. 19:3055-60, 1991). Other methods employing amplification may also be employed to obtain a full length cDNA sequence.

[1157] In certain instances, it is possible to obtain a full length cDNA sequence by analysis of sequences provided in an expressed sequence tag (EST) database, such as that available from GenBank. Searches for overlapping ESTs may generally be performed using well known programs (e.g., NCBI BLAST searches), and such ESTs may be used to generate a contiguous full length sequence. Full length DNA sequences may also be obtained by analysis of genomic fragments.

[1158] In other embodiments of the invention, polynucleotide sequences or fragments thereof which encode polypeptides of the invention, or fusion proteins or functional equivalents thereof, may be used in recombinant DNA molecules to direct expression of a polypeptide in appropriate host cells. Due to the inherent degeneracy of the genetic code, other DNA sequences that encode substantially the same or a functionally equivalent amino acid sequence may be produced and these sequences may be used to clone and express a given polypeptide.

[1159] As will be understood by those of skill in the art, it may be advantageous in some instances to produce polypeptide-encoding nucleotide sequences possessing non-naturally occurring codons. For example, codons preferred by a particular prokaryotic or eukaryotic host can be selected to increase the rate of protein expression or to produce a recombinant RNA transcript having desirable properties, such as a half-life which is longer than that of a transcript generated from the naturally occurring sequence.

[1160] Moreover, the polynucleotide sequences of the present invention can be engineered using methods generally known in the art in order to alter polypeptide encoding sequences for a variety of reasons, including but not limited to, alterations which modify the cloning, processing, and/or expression of the gene product. For example, DNA shuffling by random fragmentation and PCR reassembly of gene fragments and synthetic oligonucleotides may be used to engineer the nucleotide sequences. In addition, site-directed mutagenesis may be used to insert new restriction sites, alter glycosylation patterns, change codon preference, produce splice variants, or introduce mutations, and so forth.

[1161] In another embodiment of the invention, natural, modified, or recombinant nucleic acid sequences may be ligated to a heterologous sequence to encode a fusion protein. For example, to screen peptide libraries for inhibitors of polypeptide activity, it may be useful to encode a chimeric protein that can be recognized by a commercially available antibody. A fusion protein may also be engineered to contain a cleavage site located between the polypeptide-encoding sequence and the heterologous protein sequence, so that the polypeptide may be cleaved and purified away from the heterologous moiety.

[1162] Sequences encoding a desired polypeptide may be synthesized, in whole or in part, using chemical methods well known in the art (see Caruthers, M. H. et al. (1980) Nucl. Acids Res. Symp. Ser. 215-223, Horn, T. et al. (1980) Nucl. Acids Res. Symp. Ser. 225-232). Alternatively, the protein itself may be produced using chemical methods to synthesize the amino acid sequence of a polypeptide, or a portion thereof. For example, peptide synthesis can be performed using various solid-phase techniques (Roberge, J. Y. et al. (1995) Science 269:202-204) and automated synthesis may be achieved, for example, using the ABI 431 A Peptide Synthesizer (Perkin Elmer, Palo Alto, Calif.).

[1163] A newly synthesized peptide may be substantially purified by preparative high performance liquid chromatography (e.g., Creighton, T. (1983) Proteins, Structures and Molecular Principles, W H Freeman and Co., New York, N.Y.) or other comparable techniques available in the art. The composition of the synthetic peptides may be confirmed by amino acid analysis or sequencing (e.g., the Edman degradation procedure). Additionally, the amino acid sequence of a polypeptide, or any part thereof, may be altered during direct synthesis and/or combined using chemical methods with sequences from other proteins, or any part thereof, to produce a variant polypeptide.

[1164] In order to express a desired polypeptide, the nucleotide sequences encoding the polypeptide, or functional equivalents, may be inserted into appropriate expression vector, i.e., a vector which contains the necessary elements for the transcription and translation of the inserted coding sequence. Methods which are well known to those skilled in the art may be used to construct expression vectors containing sequences encoding a polypeptide of interest and appropriate transcriptional and translational control elements. These methods include in vitro recombinant DNA techniques, synthetic techniques, and in vivo genetic recombination. Such techniques are described, for example, in Sambrook, J. et al. (1989) Molecular Cloning, A Laboratory Manual, Cold Spring Harbor Press, Plainview, N.Y., and Ausubel, F. M. et al. (1989) Current Protocols in Molecular Biology, John Wiley & Sons, New York. N.Y.

[1165] A variety of expression vector/host systems may be utilized to contain and express polynucleotide sequences. These include, but are not limited to, microorganisms such as bacteria transformed with recombinant bacteriophage, plasmid, or cosmid DNA expression vectors; yeast transformned with yeast expression vectors; insect cell systems infected with virus expression vectors (e.g., baculovirus); plant cell systems transformed with virus expression vectors (e.g., cauliflower mosaic virus, CaMV; tobacco mosaic virus, TMV) or with bacterial expression vectors (e.g., Ti or pBR322 plasmids); or animal cell systems.

[1166] The “control elements” or “regulatory sequences” present in an expression vector are those non-translated regions of the vector—enhancers, promoters, 5′ and 3′ untranslated regions—which interact with host cellular proteins to carry out transcription and translation. Such elements may vary in their strength and specificity. Depending on the vector system and host utilized, any number of suitable transcription and translation elements, including constitutive and inducible promoters, may be used. For example, when cloning in bacterial systems, inducible promoters such as the hybrid lacZ promoter of the PBLUESCRIPT phagemid (Stratagene, La Jolla, Calif.) or PSPORTI plasmid (Gibco BRL, Gaithersburg, Md.) and the like may be used. In mammalian cell systems, promoters from mammalian genes or from mammalian viruses are generally preferred. If it is necessary to generate a cell line that contains multiple copies of the sequence encoding a polypeptide, vectors based on SV40 or EBV may be advantageously used with an appropriate selectable marker.

[1167] In bacterial systems, any of a number of expression vectors may be selected depending upon the use intended for the expressed polypeptide. For example, when large quantities are needed, for example for the induction of antibodies, vectors which direct high level expression of fusion proteins that are readily purified may be used. Such vectors include, but are not limited to, the multifunctional E. coli cloning and expression vectors such as BLUESCRIPT (Stratagene), in which the sequence encoding the polypeptide of interest may be ligated into the vector in frame with sequences for the amino-terminal Met and the subsequent 7 residues of .beta.-galactosidase so that a hybrid protein is produced; pIN vectors (Van Heeke, G. and S. M. Schuster (1989) J. Biol. Chem. 264:5503-5509); and the like. pGEX Vectors (Promega, Madison, Wis.) may also be used to express foreign polypeptides as fusion proteins with glutathione S-transferase (GST). In general, such fusion proteins are soluble and can easily be purified from lysed cells by adsorption to glutathione-agarose beads followed by elution in the presence of free glutathione. Proteins made in such systems may be designed to include heparin, thrombin, or factor XA protease cleavage sites so that the cloned polypeptide of interest can be released from the GST moiety at will.

[1168] In the yeast, Saccharomyces cerevisiae, a number of vectors containing constitutive or inducible promoters such as alpha factor, alcohol oxidase, and PGH may be used. For reviews, see Ausubel et al. (supra) and Grant et al. (1987) Methods Enzymol. 153:516-544.

[1169] In cases where plant expression vectors are used, the expression of sequences encoding polypeptides may be driven by any of a number of promoters. For example, viral promoters such as the 35S and 19S promoters of CaMV may be used alone or in combination with the omega leader sequence from TMV (Takamatsu, N. (1987) EMBO J. 6:307-311. Alternatively, plant promoters such as the small subunit of RUBISCO or heat shock promoters may be used (Coruzzi, G. et al. (1984) EMBO J. 3:1671-1680; Broglie, R. et al. (1984) Science 224:838-843; and Winter, J. et al. (1991) Results Probl. Cell Differ. 17:85-105). These constructs can be introduced into plant cells by direct DNA transformation or pathogen-mediated transfection. Such techniques are described in a number of generally available reviews (see, for example, Hobbs, S. or Murry, L. E. in McGraw Hill Yearbook of Science and Technology (1992) McGraw Hill, New York, N.Y.; pp. 191-196).

[1170] An insect system may also be used to express a polypeptide of interest. For example, in one such system, Autographa californica nuclear polyhedrosis virus (AcNPV) is used as a vector to express foreign genes in Spodoptera frugiperda cells or in Trichoplusia larvae. The sequences encoding the polypeptide may be cloned into a non-essential region of the virus, such as the polyhedrin gene, and placed under control of the polyhedrin promoter. Successful insertion of the polypeptide-encoding sequence will render the polyhedrin gene inactive and produce recombinant virus lacking coat protein. The recombinant viruses may then be used to infect, for example, S. frugiperda cells or Trichoplusia larvae in which the polypeptide of interest may be expressed (Engelhard, E. K. et al. (1994) Proc. NatL. Acad. Sci. 91 :3224-3227).

[1171] In mammalian host cells, a number of viral-based expression systems are generally available. For example, in cases where an adenovirus is used as an expression vector, sequences encoding a polypeptide of interest may be ligated into an adenovirus transcription/translation complex consisting of the late promoter and tripartite leader sequence. Insertion in a non-essential E1 or E3 region of the viral genome may be used to obtain a viable virus which is capable of expressing the polypeptide in infected host cells (Logan, J. and Shenk, T. (1984) Proc. Natl. Acad. Sci. 81:3655-3659). In addition, transcription enhancers, such as the Rous sarcoma virus (RSV) enhancer, may be used to increase expression in mammalian host cells.

[1172] Specific initiation signals may also be used to achieve more efficient translation of sequences encoding a polypeptide of interest. Such signals include the ATG initiation codon and adjacent sequences. In cases where sequences encoding the polypeptide, its initiation codon, and upstream sequences are inserted into the appropriate expression vector, no additional transcriptional or translational control signals may be needed. However, in cases where only coding sequence, or a portion thereof, is inserted, exogenous translational control signals including the ATG initiation codon should be provided. Furthermore, the initiation codon should be in the correct reading frame to ensure translation of the entire insert. Exogenous translational elements and initiation codons may be of various origins, both natural and synthetic. The efficiency of expression may be enhanced by the inclusion of enhancers which are appropriate for the particular cell system which is used, such as those described in the literature (Scharf, D. et al. (1994) Results Probl. Cell Differ. 20:125-162).

[1173] In addition, a host cell strain may be chosen for its ability to modulate the expression of the inserted sequences or to process the expressed protein in the desired fashion. Such modifications of the polypeptide include, but are not limited to, acetylation, carboxylation glycosylation, phosphorylation, lipidation, and acylation. Post-translational processing which cleaves a “prepro” form of the protein may also be used to facilitate correct insertion, folding and/or function. Different host cells such as CHO, COS, HeLa, MDCK, HEK293, and W138, which have specific cellular machinery and characteristic mechanisms for such post-translational activities, may be chosen to ensure the correct modification and processing of the foreign protein.

[1174] For long-term, high-yield production of recombinant proteins, stable expression is generally preferred. For example, cell lines which stably express a polynucleotide of interest may be transformed using expression vectors which may contain viral origins of replication and/or endogenous expression elements and a selectable marker gene on the same or on a separate vector. Following the introduction of the vector, cells may be allowed to grow for 1-2 days in an enriched media before they are switched to selective media. The purpose of the selectable marker is to confer resistance to selection, and its presence allows growth and recovery of cells which successfully express the introduced sequences. Resistant clones of stably transformed cells may be proliferated using tissue culture techniques appropriate to the cell type.

[1175] Any number of selection systems may be used to recover transformed cell lines. These include, but are not limited to, the herpes simplex virus thymidine kinase (Wigler, M. et al. (1977) Cell 11:223-32) and adenine phosphoribosyltransferase (Lowy, I. et al. (1990) Cell 22:817-23) genes which can be employed in tk.sup.- or aprt.sup.- cells, respectively. Also, antimetabolite, antibiotic or herbicide resistance can be used as the basis for selection; for example, dhfr which confers resistance to methotrexate (Wigler, M. et al. (1980) Proc. Natl. Acad. Sci. 77:3567-70); npt, which confers resistance to the aminoglycosides, neomycin and G-418 (Colbere-Garapin, F. et al (1981) J Mol. Biol. 150:1-14); and als or pat, which confer resistance to chlorsulfuron and phosphinotricin acetyltransferase, respectively (Murry, supra). Additional selectable genes have been described, for example, trpB, which allows cells to utilize indole in place of tryptophan, or hisD, which allows cells to utilize histinol in place of histidine (Hartman, S. C. and R. C. Mulligan (1988) Proc. Natl. Acad. Sci. 85:8047-51). The use of visible markers has gained popularity with such markers as anthocyanins, beta-glucuronidase and its substrate GUS, and luciferase and its substrate luciferin, being widely used not only to identify transformants, but also to quantify the amount of transient or stable protein expression attributable to a specific vector system (Rhodes, C. A. et al. (1995) Methods Mol. Biol. 55:121-131).

[1176] Although the presence/absence of marker gene expression suggests that the gene of interest is also present, its presence and expression may need to be confirmed. For example, if the sequence encoding a polypeptide is inserted within a marker gene sequence, recombinant cells containing sequences can be identified by the absence of marker gene function. Alternatively, a marker gene can be placed in tandem with a polypeptide-encoding sequence under the control of a single promoter. Expression of the marker gene in response to induction or selection usually indicates expression of the tandem gene as well.

[1177] Alternatively, host cells that contain and express a desired polynucleotide sequence may be identified by a variety of procedures known to those of skill in the art. These procedures include, but are not limited to, DNA-DNA or DNA-RNA hybridizations and protein bioassay or immunoassay techniques which include, for example, membrane, solution, or chip based technologies for the detection and/or quantification of nucleic acid or protein.

[1178] A variety of protocols for detecting and measuring the expression of polynucleotide-encoded products, using either polyclonal or monoclonal antibodies specific for the product are known in the art. Examples include enzyme-linked immunosorbent assay (ELISA), radioimmunoassay (RIA), and fluorescence activated cell sorting (FACS). A two-site, monoclonal-based immunoassay utilizing monoclonal antibodies reactive to two non-interfering epitopes on a given polypeptide may be preferred for some applications, but a competitive binding assay may also be employed. These and other assays are described, among other places, in Hampton, R. et al. (1990; Serological Methods, a Laboratory Manual, APS Press, St Paul. Minn.) and Maddox, D. E. et al. (1983; J. Exp. Med. 158:1211-1216).

[1179] A wide variety of labels and conjugation techniques are known by those skilled in the art and may be used in various nucleic acid and amino acid assays. Means for producing labeled hybridization or PCR probes for detecting sequences related to polynucleotides include oligolabeling, nick translation, end-labeling or PCR amplification using a labeled nucleotide. Alternatively, the sequences, or any portions thereof may be cloned into a vector for the production of an mRNA probe. Such vectors are known in the art, are commercially available, and may be used to synthesize RNA probes in vitro by addition of an appropriate RNA polymerase such as T7, T3, or SP6 and labeled nucleotides. These procedures may be conducted using a variety of commercially available kits. Suitable reporter molecules or labels, which may be used include radionuclides, enzymes, fluorescent, chemiluminescent, or chromogenic agents as well as substrates, cofactors, inhibitors, magnetic particles, and the like.

[1180] Host cells transformned with a polynucleotide sequence of interest may be cultured under conditions suitable for the expression and recovery of the protein from cell culture. The protein produced by a recombinant cell may be secreted or contained intracellularly depending on the sequence and/or the vector used. As will be understood by those of skill in the art, expression vectors containing polynucleotides of the invention may be designed to contain signal sequences which direct secretion of the encoded polypeptide through a prokaryotic or eukaryotic cell membrane. Other recombinant constructions may be used to join sequences encoding a polypeptide of interest to nucleotide sequence encoding a polypeptide domain which will facilitate purification of soluble proteins. Such purification facilitating domains include, but are not limited to, metal chelating peptides such as histidine-tryptophan modules that allow purification on immobilized metals, protein A domains that allow purification on immobilized immunoglobulin, and the domain utilized in the FLAGS extension/affinity purification system (Immunex Corp., Seattle, Wash.). The inclusion of cleavable linker sequences such as those specific for Factor XA or enterokinase (Invitrogen. San Diego, Calif.) between the purification domain and the encoded polypeptide may be used to facilitate purification. One such expression vector provides for expression of a fusion protein containing a polypeptide of interest and a nucleic acid encoding 6 histidine residues preceding a thioredoxin or an enterokinase cleavage site. The histidine residues facilitate purification on IMIAC (immobilized metal ion affinity chromatography) as described in Porath, J. et al. (1992, Prot. Exp. Purif 3:263-281) while the enterokinase cleavage site provides a means for purifying the desired polypeptide from the fusion protein. A discussion of vectors which contain fusion proteins is provided in Kroll, D. J. et al. (1993; DNA Cell Biol. 12:441-453).

[1181] In addition to recombinant production methods, polypeptides of the invention, and fragments thereof, may be produced by direct peptide synthesis using solid-phase techniques (Merrifield J. (1963) J. Am. Chem. Soc. 85:2149-2154). Protein synthesis may be performed using manual techniques or by automation. Automated synthesis may be achieved, for example, using Applied Biosystems 431A Peptide Synthesizer (Perkin Elmer). Alternatively, various fragments may be chemically synthesized separately and combined using chemical methods to produce the full length molecule.

[1182] Antibody Compositions, Fragments Thereof and Other Binding Agents

[1183] According to another aspect, the present invention further provides binding agents, such as antibodies and antigen-binding fragments thereof, that exhibit immunological binding to a tumor polypeptide disclosed herein, or to a portion, variant or derivative thereof. An antibody, or antigen-binding fragment thereof, is said to “specifically bind,” “immunogically bind,” and/or is “immunologically reactive” to a polypeptide of the invention if it reacts at a detectable level (within, for example, an ELISA assay) with the polypeptide, and does not react detectably with unrelated polypeptides under similar conditions.

[1184] Immunological binding, as used in this context, generally refers to the non-covalent interactions of the type which occur between an immunoglobulin molecule and an antigen for which the immunoglobulin is specific. The strength, or affinity of immunological binding interactions can be expressed in terms of the dissociation constant (K_{d}) of the interaction, wherein a smaller K_{d} represents a greater affinity. Immunological binding properties of selected polypeptides can be quantified using methods well known in the art. One such method entails measuring the rates of antigen-binding site/antigen complex formation and dissociation, wherein those rates depend on the concentrations of the complex partners, the affinity of the interaction, and on geometric parameters that equally influence the rate in both directions. Thus, both the “on rate constant” (Kₒₙ) and the “off rate constant” (K_{off}) can be determined by calculation of the concentrations and the actual rates of association and dissociation. The ratio of K_{off}/Kₒₙ enables cancellation of all parameters not related to affinity, and is thus equal to the dissociation constant K_{d}. See, generally, Davies et al. (1990) Annual Rev. Biochem. 59:439-473.

[1185] An “antigen-binding site,” or “binding portion” of an antibody refers to the part of the immunoglobulin molecule that participates in antigen binding. The antigen binding site is formed by amino acid residues of the N-terminal variable (“V”) regions of the heavy (“H”) and light (“L”) chains. Three highly divergent stretches within the V regions of the heavy and light chains are referred to as “hypervariable regions” which are interposed between more conserved flanking stretches known as “framework regions,” or “FRs”. Thus the term “FR” refers to amino acid sequences which are naturally found between and adjacent to hypervariable regions in immunoglobulins. In an antibody molecule, the three hypervariable regions of a light chain and the three hypervariable regions of a heavy chain are disposed relative to each other in three dimensional space to form an antigen-binding surface. The antigen-binding surface is complementary to the three-dimensional surface of a bound antigen, and the three hypervariable regions of each of the heavy and light chains are referred to as “complementarity-determining regions,” or “CDRs.”

[1186] Binding agents may be further capable of differentiating between patients with and without a cancer, such as lung cancer, using the representative assays provided herein. For example, antibodies or other binding agents that bind to a tumor protein will preferably generate a signal indicating the presence of a cancer in at least about 20% of patients with the disease, more preferably at least about 30% of patients. Alternatively, or in addition, the antibody will generate a negative signal indicating the absence of the disease in at least about 90% of individuals without the cancer. To determine whether a binding agent satisfies this requirement, biological samples (e.g., blood, sera, sputum, urine and/or tumor biopsies) from patients with and without a cancer (as determined using standard clinical tests) may be assayed as described herein for the presence of polypeptides that bind to the binding agent. Preferably, a statistically significant number of samples with and without the disease will be assayed. Each binding agent should satisfy the above criteria; however, those of ordinary skill in the art will recognize that binding agents may be used in combination to improve sensitivity.

[1187] Any agent that satisfies the above requirements may be a binding agent. For example, a binding agent may be a ribosome, with or without a peptide component, an RNA molecule or a polypeptide. In a preferred embodiment, a binding agent is an antibody or an antigen-binding fragment thereof. Antibodies may be prepared by any of a variety of techniques known to those of ordinary skill in the art. See, e.g., Harlow and Lane, Antibodies: A Laboratory tlanual, Cold Spring Harbor Laboratory, 1988. In general, antibodies can be produced by cell culture techniques, including the generation of monoclonal antibodies as described herein, or via transfection of antibody genes into suitable bacterial or mammalian cell hosts, in order to allow for the production of recombinant antibodies. In one technique, an immunogen comprising the polypeptide is initially injected into any of a wide variety of mammals (e.g., mice, rats, rabbits, sheep or goats). In this step, the polypeptides of this invention may serve as the immunogen without modification. Alternatively, particularly for relatively short polypeptides, a superior immune response may be elicited if the polypeptide is joined to a carrier protein, such as bovine serum albumin or keyhole limpet hemocyanin. The immunogen is injected into the animal host, preferably according to a predetermined schedule incorporating one or more booster immunizations, and the animals are bled periodically. Polyclonal antibodies specific for the polypeptide may then be purified from such antisera by, for example, affinity chromatography using the polypeptide coupled to a suitable solid support.

[1188] Monoclonal antibodies specific for an antigenic polypeptide of interest may be prepared, for example, using the technique of Kohler and Milstein, Eur. J Immunol. 6:511-519, 1976, and improvements thereto. Briefly, these methods involve the preparation of immortal cell lines capable of producing antibodies having the desired specificity (i.e., reactivity with the polypeptide of interest). Such cell lines may be produced, for example, from spleen cells obtained from an animal immunized as described above. The spleen cells are then immortalized by, for example, fusion with a myeloma cell fusion partner, preferably one that is syngeneic with the immunized animal. A variety of fusion techniques may be employed. For example, the spleen cells and myeloma cells may be combined with a nonionic detergent for a few minutes and then plated at low density on a selective medium that supports the growth of hybrid cells, but not myeloma cells. A preferred selection technique uses HAT (hypoxanthine, aminopterin, thymidine) selection. After a sufficient time, usually about 1 to 2 weeks, colonies of hybrids are observed. Single colonies are selected and their culture supernatants tested for binding activity against the polypeptide. Hybridomas having high reactivity and specificity are preferred.

[1189] Monoclonal antibodies may be isolated from the supernatants of growing hybridoma colonies. In addition, various techniques may be employed to enhance the yield, such as injection of the hybridoma cell line into the peritoneal cavity of a suitable vertebrate host, such as a mouse. Monoclonal antibodies may then be harvested from the ascites fluid or the blood. Contaminants may be removed from the antibodies by conventional techniques, such as chromatography, gel filtration, precipitation, and extraction. The polypeptides of this invention may be used in the purification process in, for example, an affinity chromatography step.

[1190] A number of therapeutically useful molecules are known in the art which comprise antigen-binding sites that are capable of exhibiting immunological binding properties of an antibody molecule. The proteolytic enzyme papain preferentially cleaves IgG molecules to yield several fragments, two of which (the “F(ab)” fragments) each comprise a covalent heterodimer that includes an intact antigen-binding site. The enzyme pepsin is able to cleave IgG molecules to provide several fragments, including the “F(ab′)₂” fragment which comprises both antigen-binding sites. An “Fv” fragment can be produced by preferential proteolytic cleavage of an IgM, and on rare occasions IgG or IgA immunoglobulin molecule. Fv fragments are, however, more commonly derived using recombinant techniques known in the art. The Fv fragment includes a non-covalent V_{H}::V_{L} heterodimer including an antigen-binding site which retains much of the antigen recognition and binding capabilities of the native antibody molecule. Inbar et al. (1972) Proc. Nat. Acad. Sci. USA 69:2659-2662; Hochman et al. (1976) Biochem 15:2706-2710; and Ehrlich et al. (1980) Biochem 19:4091-4096.

[1191] A single chain Fv (“sFv”) polypeptide is a covalently linked V_{H}::V_{L} heterodimer which is expressed from a gene fusion including V_{H}- and V_{L}-encoding genes linked by a peptide-encoding linker. Huston et al. (1988) Proc. Nat. Acad. Sci. USA 85(16):5879-5883. A number of methods have been described to discern chemical structures for converting the naturally aggregated—but chemically separated—light and heavy polypeptide chains from an antibody V region into an sFv molecule which will fold into a three dimensional structure substantially similar to the structure of an antigen-binding site. See, e.g., U.S. Pat. Nos. 5,091,513 and 5,132,405, to Huston et al.; and U.S. Pat. No. 4,946,778, to Ladner et al.

[1192] Each of the above-described molecules includes a heavy chain and a light chain CDR set, respectively interposed between a heavy chain and a light chain FR set which provide support to the CDRS and define the spatial relationship of the CDRs relative to each other. As used herein, the term “CDR set” refers to the three hypervariable regions of a heavy or light chain V region. Proceeding from the N-terminus of a heavy or light chain, these regions are denoted as “CDRI,” “CDR2,” and “CDR3” respectively. An antigen-binding site, therefore, includes six CDRs, comprising the CDR set from each of a heavy and a light chain V region. A polypeptide comprising a single CDR, (e.g., a CDRI, CDR2 or CDR3) is referred to herein as a “molecular recognition unit.” Crystallographic analysis of a number of antigen-antibody complexes has demonstrated that the amino acid residues of CDRs form extensive contact with bound antigen, wherein the most extensive antigen contact is with the heavy chain CDR3. Thus, the molecular recognition units are primarily responsible for the specificity of an antigen-binding site.

[1193] As used herein, the term “FR set” refers to the four flanking amino acid sequences which frame the CDRs of a CDR set of a heavy or light chain V region. Some FR residues may contact bound antigen; however, FRs are primarily responsible for folding the V region into the antigen-binding site, particularly the FR residues directly adjacent to the CDRS. Within FRs, certain amino residues and certain structural features are very highly conserved. In this regard, all V region sequences contain an internal disulfide loop of around 90 amino acid residues. When the V regions fold into a binding-site, the CDRs are displayed as projecting loop motifs which form an antigen-binding surface. It is generally recognized that there are conserved structural regions of FRs which influence the folded shape of the CDR loops into certain “canonical” structures—regardless of the precise CDR amino acid sequence. Further, certain FR residues are known to participate in non-covalent interdomain contacts which stabilize the interaction of the antibody heavy and light chains.

[1194] A number of “humanized” antibody molecules comprising an antigen-binding site derived from a non-human immunoglobulin have been described, including chimeric antibodies having rodent V regions and their associated CDRs fused to human constant domains (Winter et al. (1991) Nature 349:293-299; Lobuglio et al. (1989) Proc. Nat. Acad. Sci. USA 86:4220-4224; Shaw et al. (1987) J Immunol. 138:4534-4538; and Brown et al. (1987) Cancer Res. 47:3577-3583), rodent CDRs grafted into a human supporting FR prior to fusion with an appropriate human antibody constant domain (Riechmann et al. (1988) Nature 332:323-327; Verhoeyen et al. (1988) Science 239:1534-1536; and Jones et al. (1986) Nature 321:522-525), and rodent CDRs supported by recombinantly veneered rodent FRs (European Patent Publication No. 519,596, published Dec. 23, 1992). These “humanized” molecules are designed to minimize unwanted immunological response toward rodent antihuman antibody molecules which limits the duration and effectiveness of therapeutic applications of those moieties in human recipients.

[1195] As used herein, the terms “veneered FRs” and “recombinantly veneered FRs” refer to the selective replacement of FR residues from, e.g., a rodent heavy or light chain V region, with human FR residues in order to provide a xenogeneic molecule comprising an antigen-binding site which retains substantially all of the native FR polypeptide folding structure. Veneering techniques are based on the understanding that the ligand binding characteristics of an antigen-binding site are determined primarily by the structure and relative disposition of the heavy and light chain CDR sets within the antigen-binding surface. Davies et al. (1990) Ann. Rev. Biochem. 59:439-473. Thus, antigen binding specificity can be preserved in a humanized antibody only wherein the CDR structures, their interaction with each other, and their interaction with the rest of the V region domains are carefully maintained. By using veneering techniques, exterior (e.g., solvent-accessible) FR residues which are readily encountered by the immune system are selectively replaced with human residues to provide a hybrid molecule that comprises either a weakly immunogenic, or substantially non-immunogenic veneered surface.

[1196] The process of veneering makes use of the available sequence data for human antibody variable domains compiled by Kabat et al., in Sequences of Proteins of Immunological Interest, 4th ed., (U.S. Dept. of Health and Human Services, U.S. Government Printing Office, 1987), updates to the Kabat database, and other accessible U.S. and foreign databases (both nucleic acid and protein). Solvent accessibilities of V region amino acids can be deduced from the known three-dimensional structure for human and murine antibody fragments. There are two general steps in veneering a murine antigen-binding site. Initially, the FRs of the variable domains of an antibody molecule of interest are compared with corresponding FR sequences of human variable domains obtained from the above-identified sources. The most homologous human V regions are then compared residue by residue to corresponding murine amino acids. The residues in the murine FR which differ from the human counterpart are replaced by the residues present in the human moiety using recombinant techniques well known in the art. Residue switching is only carried out with moieties which are at least partially exposed (solvent accessible), and care is exercised in the replacement of amino acid residues which may have a significant effect on the tertiary structure of V region domains, such as proline, glycine and charged amino acids.

[1197] In this manner, the resultant “veneered” murine antigen-binding sites are thus designed to retain the murine CDR residues, the residues substantially adjacent to the CDRs, the residues identified as buried or mostly buried (solvent inaccessible), the residues believed to participate in non-covalent (e.g., electrostatic and hydrophobic) contacts between heavy and light chain domains, and the residues from conserved structural regions of the FRs which are believed to influence the “canonical” tertiary structures of the CDR loops. These design criteria are then used to prepare recombinant nucleotide sequences which combine the CDRs of both the heavy and light chain of a murine antigen-binding site into human-appearing FRs that can be used to transfect mammalian cells for the expression of recombinant human antibodies which exhibit the antigen specificity of the murine antibody molecule.

[1198] In another embodiment of the invention, monoclonal antibodies of the present invention may be coupled to one or more therapeutic agents. Suitable agents in this regard include radionuclides, differentiation inducers, drugs, toxins, and derivatives thereof. Preferred radionuclides include ⁹⁰Y, ¹²³I, ¹²⁵I, ¹³¹I, ¹⁸⁶Re, ¹⁸⁸Re, ²¹¹At, and ²¹²Bi. Preferred drugs include methotrexate, and pyrimidine and purine analogs. Preferred differentiation inducers include phorbol esters and butyric acid. Preferred toxins include ricin, abrin, diptheria toxin, cholera toxin, gelonin, Pseudomonas exotoxin, Shigella toxin, and pokeweed antiviral protein.

[1199] A therapeutic agent may be coupled (e.g., covalently bonded) to a suitable monoclonal antibody either directly or indirectly (e.g., via a linker group). A direct reaction between an agent and an antibody is possible when each possesses a substituent capable of reacting with the other. For example, a nucleophilic group, such as an amino or sulfhydryl group, on one may be capable of reacting with a carbonyl-containing group, such as an anhydride or an acid halide, or with an alkyl group containing a good leaving group (e.g., a halide) on the other.

[1200] Alternatively, it may be desirable to couple a therapeutic agent and an antibody via a linker group. A linker group can function as a spacer to distance an antibody from an agent in order to avoid interference with binding capabilities. A linker group can also serve to increase the chemical reactivity of a substituent on an agent or an antibody, and thus increase the coupling efficiency. An increase in chemical reactivity may also facilitate the use of agents, or functional groups on agents, which otherwise would not be possible.

[1201] It will be evident to those skilled in the art that a variety of bifunctional or polyfunctional reagents, both homo- and hetero-functional (such as those described in the catalog of the Pierce Chemical Co., Rockford, Ill.), may be employed as the linker group. Coupling may be effected, for example, through amino groups, carboxyl groups, sulfhydryl groups or oxidized carbohydrate residues. There are numerous references describing such methodology, e.g., U.S. Pat. No. 4,671,958, to Rodwell et al.

[1202] Where a therapeutic agent is more potent when free from the antibody portion of the immunoconjugates of the present invention, it may be desirable to use a linker group which is cleavable during or upon internalization into a cell. A number of different cleavable linker groups have been described. The mechanisms for the intracellular release of an agent from these linker groups include cleavage by reduction of a disulfide bond (e.g., U.S. Pat. No. 4,489,710, to Spitler), by irradiation of a photolabile bond (e.g., U.S. Pat. No. 4,625,014, to Senter et al.), by hydrolysis of derivatized amino acid side chains (e.g., U.S. Pat. No. 4,638,045, to Kohn et al.), by serum complement-mediated hydrolysis (e.g., U.S. Pat. No. 4,671,958, to Rodwell et al.), and acid-catalyzed hydrolysis (e.g., U.S. Pat. No. 4,569,789, to Blattler et al.).

[1203] It may be desirable to couple more than one agent to an antibody. In one embodiment, multiple molecules of an agent are coupled to one antibody molecule. In another embodiment, more than one type of agent may be coupled to one antibody. Regardless of the particular embodiment, immunoconjugates with more than one agent may be prepared in a variety of ways. For example, more than one agent may be coupled directly to an antibody molecule, or linkers that provide multiple sites for attachment can be used. Alternatively, a carrier can be used.

[1204] A carrier may bear the agents in a variety of ways, including covalent bonding either directly or via a linker group. Suitable carriers include proteins such as albumins (e.g., U.S. Pat. No. 4,507,234, to Kato et al.), peptides and polysaccharides such as aminodextran (e.g, U.S. Pat. No. 4,699,784, to Shih et al.). A carrier may also bear an agent by noncovalent bonding or by encapsulation, such as within a liposome vesicle (e.g., U.S. Pat. Nos. 4,429,008 and 4,873,088). Carriers specific for radionuclide agents include radiohalogenated small molecules and chelating compounds. For example, U.S. Pat. No. 4,735,792 discloses representative radiohalogenated small molecules and their synthesis. A radionuclide chelate may be formed from chelating compounds that include those containing nitrogen and sulfur atoms as the donor atoms for binding the metal, or metal oxide, radionuclide. For example, U.S. Pat. No. 4,673,562, to Davison et al. discloses representative chelating compounds and their synthesis.

[1205] T Cell Compositions

[1206] The present invention, in another aspect, provides T cells specific for a tumor polypeptide disclosed herein, or for a variant or derivative thereof. Such cells may generally be prepared in vitro or ex vivo, using standard procedures. For example, T cells may be isolated from bone marrow, peripheral blood, or a fraction of bone marrow or peripheral blood of a patient, using a commercially available cell separation system, such as the Isolex™ System, available from Nexell Therapeutics, Inc. (Irvine, Calif.; see also U.S. Pat. No. 5,240,856; U.S. Pat. No. 5,215,926; WO 89/06280; WO 91/16116 and WO 92/07243). Alternatively, T cells may be derived from related or unrelated humans, non-human mammals, cell lines or cultures.

[1207] T cells may be stimulated with a polypeptide, polynucleotide encoding a polypeptide and/or an antigen presenting cell (APC) that expresses such a polypeptide. Such stimulation is performed under conditions and for a time sufficient to permit the generation of T cells that are specific for the polypeptide of interest. Preferably, a tumor polypeptide or polynucleotide of the invention is present within a delivery vehicle, such as a microsphere, to facilitate the generation of specific T cells.

[1208] T cells are considered to be specific for a polypeptide of the present invention if the T cells specifically proliferate, secrete cytokines or kill target cells coated with the polypeptide or expressing a gene encoding the polypeptide. T cell specificity may be evaluated using any of a variety of standard techniques. For example, within a chromium release assay or proliferation assay, a stimulation index of more than two fold increase in lysis and/or proliferation, compared to negative controls, indicates T cell specificity. Such assays may be performed, for example, as described in Chen et al., Cancer Res. 54:1065-1070, 1994. Alternatively, detection of the proliferation of T cells may be accomplished by a variety of known techniques. For example, T cell proliferation can be detected by measuring an increased rate of DNA synthesis (e.g., by pulse-labeling cultures of T cells with tritiated thymidine and measuring the amount of tritiated thymidine incorporated into DNA). Contact with a tumor polypeptide (100 ng/ml-100 μg/ml, preferably 200 ng/ml-25 μg/ml) for 3-7 days will typically result in at least a two fold increase in proliferation of the T cells. Contact as described above for 2-3 hours should result in activation of the T cells, as measured using standard cytokine assays in which a two fold increase in the level of cytokine release (e.g., TNF or IFN-γ) is indicative of T cell activation (see Coligan et al., Current Protocols in Immunology, vol. 1, Wiley Interscience (Greene 1998)). T cells that have been activated in response to a tumor polypeptide, polynucleotide or polypeptide-expressing APC may be CD4⁺ and/or CD8⁺. Tumor polypeptide-specific T cells may be expanded using standard techniques. Within preferred embodiments, the T cells are derived from a patient, a related donor or an unrelated donor, and are administered to the patient following stimulation and expansion.

[1209] For therapeutic purposes, CD4⁺ or CD8⁺ T cells that proliferate in response to a tumor polypeptide, polynucleotide or APC can be expanded in number either in vitro or in vivo. Proliferation of such T cells in vitro may be accomplished in a variety of ways. For example, the T cells can be re-exposed to a tumor polypeptide, or a short peptide corresponding to an immunogenic portion of such a polypeptide, with or without the addition of T cell growth factors, such as interleukin-2, and/or stimulator cells that synthesize a tumor polypeptide. Alternatively, one or more T cells that proliferate in the presence of the tumor polypeptide can be expanded in number by cloning. Methods for cloning cells are well known in the art, and include limiting dilution.

[1210] T Cell Receptor Compositions

[1211] The T cell receptor (TCR) consists of 2 different, highly variable polypeptide chains, termed the T-cell receptor o. and 0 chains, that are linked by a disulfide bond (Janeway, Travers, Walport. Immunobiology. Fourth Ed., 148-159. Elsevier Science Ltd/Garland Publishing. 1999). The α/β heterodimer complexes with the invariant CD3 chains at the cell membrane. This complex recognizes specific antigenic peptides bound to MHC molecules. The enormous diversity of TCR specificities is generated much like immunoglobulin diversity, through somatic gene rearrangement. The β chain genes contain over 50 variable (V), 2 diversity (D), over 10 joining (J) segments, and 2 constant region segments (C). The α chain genes contain over 70 V segments, and over 60 J segments but no D segments, as well as one C segment. During T cell development in the thymus, the D to J gene rearrangement of the β chain occurs, followed by the V gene segment rearrangement to the DJ. This functional VDJ_{β} exon is transcribed and spliced to join to a C_{β}. For the α chain, a V_{α} gene segment rearranges to a J_{α} gene segment to create the functional exon that is then transcribed and spliced to the C_{α}. Diversity is further increased during the recombination process by the random addition of P and N-nucleotides between the V, D, and J segments of the β chain and between the V and J segments in the α chain (Janeway, Travers, Walport. Immunobiology. Fourth Ed., 98 and 150. Elsevier Science Ltd/Garland Publishing. 1999).

[1212] The present invention, in another aspect, provides TCRs specific for a polypeptide disclosed herein, or for a variant or derivative thereof. In accordance with the present invention, polynucleotide and amino acid sequences are provided for the V-J or V-D-J junctional regions or parts thereof for the alpha and beta chains of the T-cell receptor which recognize tumor polypeptides described herein. In general, this aspect of the invention relates to T-cell receptors which recognize or bind tumor polypeptides presented in the context of MHC. In a preferred embodiment the tumor antigens recognized by the T-cell receptors comprise a polypeptide of the present invention. For example, cDNA encoding a TCR specific for a _tumor peptide can be isolated from T cells specific for a tumor polypeptide using standard molecular biological and recombinant DNA techniques.

[1213] This invention further includes the T-cell receptors or analogs thereof having substantially the same function or activity as the T-cell receptors of this invention which recognize or bind tumor polypeptides. Such receptors include, but are not limited to, a fragment of the receptor, or a substitution, addition or deletion mutant of a T-cell receptor provided herein. This invention also encompasses polypeptides or peptides that are substantially homologous to the T-cell receptors provided herein or that retain substantially the same activity. The term “analog” includes any protein or polypeptide having an amino acid residue sequence substantially identical to the T-cell receptors provided herein in which one or more residues, preferably no more than 5 residues, more preferably no more than 25 residues have been conservatively substituted with a functionally similar residue and which displays the functional aspects of the T-cell receptor as described herein.

[1214] The present invention further provides for suitable mammalian host cells, for example, non-specific T cells, that are transfected with a polynucleotide encoding TCRs specific for a polypeptide described herein, thereby rendering the host cell specific for the polypeptide. The α and β chains of the TCR may be contained on separate expression vectors or alternatively, on a single expression vector that also contains an internal ribosome entry site (IRES) for cap-independent translation of the gene downstream of the IRES. Said host cells expressing TCRs specific for the polypeptide may be used, for example, for adoptive immunotherapy of lung cancer as discussed further below.

[1215] In further aspects of the present invention, cloned TCRs specific for a polypeptide recited herein may be used in a kit for the diagnosis of lung cancer. For example, the nucleic acid sequence or portions thereof, of tumor-specific TCRs can be used as probes or primers for the detection of expression of the rearranged genes encoding the specific TCR in a biological sample. Therefore, the present invention further provides for an assay for detecting messenger RNA or DNA encoding the TCR specific for a polypeptide.Pharmaceutical Compositions

[1216] In additional embodiments, the present invention concerns formulation of one or more of the polynucleotide, polypeptide, T-cell and/or antibody compositions disclosed herein in pharrnaceutically-acceptable carriers for administration to a cell or an animal, either alone, or in combination with one or more other modalities of therapy.

[1217] It will be understood that, if desired, a composition as disclosed herein may be administered in combination with other agents as well, such as, e.g., other proteins or polypeptides or various pharmaceutically-active agents. In fact, there is virtually no limit to other components that may also be included, given that the additional agents do not cause a significant adverse effect upon contact with the target cells or host tissues. The compositions may thus be delivered along with various other agents as required in the particular instance. Such compositions may be purified from host cells or other biological sources, or alternatively may be chemically synthesized as described herein. Likewise, such compositions may further comprise substituted or derivatized RNA or DNA compositions.

[1218] Therefore, in another aspect of the present invention, pharmaceutical compositions are provided comprising one or more of the polynucleotide, polypeptide, antibody, and/or T-cell compositions described herein in combination with a physiologically acceptable carrier. In certain preferred embodiments, the pharmaceutical compositions of the invention comprise immunogenic polynucleotide and/or polypeptide compositions of the invention for use in prophylactic and theraputic vaccine applications. Vaccine preparation is generally described in, for example, M. F. Powell and M. J. Newman, eds., “Vaccine Design (the subunit and adjuvant approach),” Plenum Press (NY, 1995). Generally, such compositions will comprise one or more polynucleotide and/or polypeptide compositions of the present invention in combination with one or more immunostimulants.

[1219] It will be apparent that any of the pharmaceutical compositions described herein can contain pharmaceutically acceptable salts of the polynucleotides and polypeptides of the invention. Such salts can be prepared, for example, from pharmaceutically acceptable non-toxic bases, including organic bases (e.g., salts of primary, secondary and tertiary amines and basic amino acids) and inorganic bases (e.g., sodium, potassium, lithium, ammonium, calcium and magnesium salts).

[1220] In another embodiment, illustrative immunogenic compositions, e.g., vaccine compositions, of the present invention comprise DNA encoding one or more of the polypeptides as described above, such that the polypeptide is generated in situ. As noted above, the polynucleotide may be administered within any of a variety of delivery systems known to those of ordinary skill in the art. Indeed, numerous gene delivery techniques are well known in the art, such as those described by Rolland, Crit. Rev. Therap. Drug Carrier Systems 15:143-198, 1998, and references cited therein. Appropriate polynucleotide expression systems will, of course, contain the necessary regulatory DNA regulatory sequences for expression in a patient (such as a suitable promoter and terminating signal). Alternatively, bacterial delivery systems may involve the administration of a bacterium (such as Bacillus-Calmette-Guerrin) that expresses an immunogenic portion of the polypeptide on its cell surface or secretes such an epitope.

[1221] Therefore, in certain embodiments, polynucleotides encoding immunogenic polypeptides described herein are introduced into suitable mammalian host cells for expression using any of a number of known viral-based systems. In one illustrative embodiment, retroviruses provide a convenient and effective platform for gene delivery systems. A selected nucleotide sequence encoding a polypeptide of the present invention can be inserted into a vector and packaged in retroviral particles using techniques known in the art. The recombinant virus can then be isolated and delivered to a subject. A number of illustrative retroviral systems have been described (e.g., U.S. Pat. No. 5,219,740; Miller and Rosman (1989) BioTechniques 7:980-990; Miller, A. D. (1990) Human Gene Therapy 1:5-14; Scarpa et al. (1991) Virology 180:849-852; Burns et al. (1993) Proc. Natl. Acad. Sci. USA 90:8033-8037; and Boris-Lawrie and Temin (1993) Cur. Opin. Genet. Develop. 3:102-109.

[1222] In addition, a number of illustrative adenovirus-based systems have also been described. Unlike retroviruses which integrate into the host genome, adenoviruses persist extrachromosomally thus minimizing the risks associated with insertional mutagenesis (Haj-Ahmad and Graham (1986) J. Virol. 57:267-274; Bett et al. (1993) J. Virol. 67:5911-5921; Mittereder et al. (1994) Human Gene Therapy 5:717-729; Seth et al. (1994) J. Virol. 68:933-940; Barr et al. (1994) Gene Therapy 1:51-58; Berkner, K. L. (1988) BioTechniques 6:616-629; and Rich et al. (1993) Human Gene Therapy 4:461-476).

[1223] Various adeno-associated virus (AAV) vector systems have also been developed for polynucleotide delivery. AAV vectors can be readily constructed using techniques well known in the art. See, e.g., U.S. Pat. Nos. 5,173,414 and 5,139,941; International Publication Nos. WO 92/01070 and WO 93/03769; Lebkowski et al. (1988) Molec. Cell. Biol. 8:3988-3996; Vincent et al. (1990) Vaccines 90 (Cold Spring Harbor Laboratory Press); Carter, B. J. (1992) Current Opinion in Biotechnology 3:533-539; Muzyczka, N. (1992) Current Topics in Microbiol. and Immunol. 158:97-129; Kotin, R. M. (1994) Human Gene Therapy 5:793-801; Shelling and Smith (1994) Gene Therapy 1:165-169; and Zhou et al. (1994) J. Exp. Med. 179:1867-1875.

[1224] Additional viral vectors useful for delivering the polynucleotides encoding polypeptides of the present invention by gene transfer include those derived from the pox family of viruses, such as vaccinia virus and avian poxvirus. By way of example, vaccinia virus recombinants expressing the novel molecules can be constructed as follows. The DNA encoding a polypeptide is first inserted into an appropriate vector so that it is adjacent to a vaccinia promoter and flanking vaccinia DNA sequences, such as the sequence encoding thymidine kinase (TK). This vector is then used to transfect cells which are simultaneously infected with vaccinia. Homologous recombination serves to insert the vaccinia promoter plus the gene encoding the polypeptide of interest into the viral genome. The resulting TK.sup.(−) recombinant can be selected by culturing the cells in the presence of 5-bromodeoxyuridine and picking viral plaques resistant thereto.

[1225] A vaccinia-based infection/transfection system can be conveniently used to provide for inducible, transient expression or coexpression of one or more polypeptides described herein in host cells of an organism. In this particular system, cells are first infected in vitro with a vaccinia virus recombinant that encodes the bacteriophage T7 RNA polymerase. This polymerase displays exquisite specificity in that it only transcribes templates bearing T7 promoters. Following infection, cells are transfected with the polynucleotide or polynucleotides of interest, driven by a T7 promoter. The polymerase expressed in the cytoplasm from the vaccinia virus recombinant transcribes the transfected DNA into RNA which is then translated into polypeptide by the host translational machinery. The method provides for high level, transient, cytoplasmic production of large quantities of RNA and its translation products. See, e.g., Elroy-Stein and Moss, Proc. Natl. Acad. Sci. USA (1990) 87:6743-6747; Fuerst et al. Proc. Natl. Acad. Sci. USA (1986) 83:8122-8126.

[1226] Alternatively, avipoxviruses, such as the fowlpox and canarypox viruses, can also be used to deliver the coding sequences of interest. Recombinant avipox viruses, expressing immunogens from mammalian pathogens, are known to confer protective immunity when administered to non-avian species. The use of an Avipox vector is particularly desirable in human and other mammalian species since members of the Avipox genus can only productively replicate in susceptible avian species and therefore are not infective in mammalian cells. Methods for producing recombinant Avipoxviruses are known in the art and employ genetic recombination, as described above with respect to the production of vaccinia viruses. See, e.g., WO 91/12882; WO 89/03429; and WO 92/03545.

[1227] Any of a number of alphavirus vectors can also be used for delivery of polynucleotide compositions of the present invention, such as those vectors described in U.S. Pat. Nos. 5,843,723; 6,015,686; 6,008,035 and 6,015,694. Certain vectors based on Venezuelan Equine Encephalitis (VEE) can also be used, illustrative examples of which can be found in U.S. Pat. Nos. 5,505,947 and 5,643,576.

[1228] Moreover, molecular conjugate vectors, such as the adenovirus chimeric vectors described in Michael et al. J. Biol. Chem. (1993) 268:6866-6869 and Wagner et al. Proc. Natl. Acad. Sci. USA (1992) 89:6099-6103, can also be used for gene delivery under the invention.

[1229] Additional illustrative information on these and other known viral-based delivery systems can be found, for example, in Fisher-Hoch et al., Proc. NatL. Acad. Sci. USA 86:317-321, 1989; Flexner et al., Ann. N.Y. Acad. Sci. 569:86-103, 1989; Flexner et al., Vaccine 8:17-21, 1990; U.S. Pat. Nos. 4,603,112, 4,769,330, and 5,017,487; WO 89/01973; U.S. Pat. No. 4,777,127; GB 2,200,651; EP 0,345,242; WO 91/02805; Berkner, Biotechniques 6:616-627, 1988; Rosenfeld et al., Science 252:431-434, 1991; Kolls et al., Proc. Natl. Acad. Sci. USA 91:215-219, 1994; Kass-Eisler et al., Proc. Natl. Acad. Sci. USA 90:11498-11502, 1993; Guzman et al., Circulation 88:2838-2848, 1993; and Guzman et al., Cir. Res. 73:1202-1207, 1993.

[1230] In certain embodiments, a polynucleotide may be integrated into the genome of a target cell. This integration may be in the specific location and orientation via homologous recombination (gene replacement) or it may be integrated in a random, non-specific location (gene augmentation). In yet further embodiments, the polynucleotide may be stably maintained in the cell as a separate, episomal segment of DNA. Such polynucleotide segments or “episomes” encode sequences sufficient to permit maintenance and replication independent of or in synchronization with the host cell cycle. The manner in which the expression construct is delivered to a cell and where in the cell the polynucleotide remains is dependent on the type of expression construct employed.

[1231] In another embodiment of the invention, a polynucleotide is administered/delivered as “naked” DNA, for example as described in Ulmer et al., Science 259:1745-1749, 1993 and reviewed by Cohen, Science 259:1691-1692, 1993. The uptake of naked DNA may be increased by coating the DNA onto biodegradable beads, which are efficiently transported into the cells.

[1232] In still another embodiment, a composition of the present invention can be delivered via a particle bombardment approach, many of which have been described. In one illustrative example, gas-driven particle acceleration can be achieved with devices such as those manufactured by Powderject Pharmaceuticals PLC (Oxford, UK) and Powderject Vaccines Inc. (Madison, Wis.), some examples of which are described in U.S. Pat. Nos. 5,846,796; 6,010,478; 5,865,796; 5,584,807; and EP Pat. No. 0500 799. This approach offers a needle-free delivery approach wherein a dry powder formulation of microscopic particles, such as polynucleotide or polypeptide particles, are accelerated to high speed within a helium gas jet generated by a hand held device, propelling the particles into a target tissue of interest.

[1233] In a related embodiment, other devices and methods that may be useful for gas-driven needle-less injection of compositions of the present invention include those provided by Bioject, Inc. (Portland, Oreg.), some examples of which are described in U.S. Pat. Nos. 4,790,824; 5,064,413; 5,312,335; 5,383,851; 5,399,163; 5,520,639 and 5,993,412.

[1234] According to another embodiment, the pharmaceutical compositions described herein will comprise one or more immunostimulants in addition to the immunogenic polynucleotide, polypeptide, antibody, T-cell and/or APC compositions of this invention. An immunostimulant refers to essentially any substance that enhances or potentiates an immune response (antibody and/or cell-mediated) to an exogenous antigen. One preferred type of immunostimulant comprises an adjuvant. Many adjuvants contain a substance designed to protect the antigen from rapid catabolism, such as aluminum hydroxide or mineral oil, and a stimulator of immune responses, such as lipid A, Bortadella pertussis or Mycobacterium tuberculosis derived proteins. Certain adjuvants are commercially available as, for example, Freund's Incomplete Adjuvant and Complete Adjuvant (Difco Laboratories, Detroit, Mich.); Merck Adjuvant 65 (Merck and Company, Inc., Rahway, N.J.); AS-2 (SmithKline Beecham, Philadelphia, Pa.); aluminum salts such as aluminum hydroxide gel (alum) or aluminum phosphate; salts of calcium, iron or zinc; an insoluble suspension of acylated tyrosine; acylated sugars; cationically or anionically derivatized polysaccharides; polyphosphazenes; biodegradable microspheres; monophosphoryl lipid A and quil A. Cytokines, such as GM-CSF, interleukin-2, -7, -12, and other like growth factors, may also be used as adjuvants.

[1235] Within certain embodiments of the invention, the adjuvant composition is preferably one that induces an immune response predominantly of the Th1 type. High levels of Th1-type cytokines (e.g., IFN-γ, TNFα, IL-2 and IL-12) tend to favor the induction of cell mediated immune responses to an administered antigen. In contrast, high levels of Th2-type cytokines (e.g., IL-4, IL-5, IL-6 and IL-I 0) tend to favor the induction of humoral immune responses. Following application of a vaccine as provided herein, a patient will support an immune response that includes Th1- and Th2-type responses. Within a preferred embodiment, in which a response is predominantly Th1-type, the level of Th1-type cytokines will increase to a greater extent than the level of Th2-type cytokines. The levels of these cytokines may be readily assessed using standard assays. For a review of the families of cytokines, see Mosmann and Coffman, Ann. Rev. Immunol. 7:145-173, 1989.

[1236] Certain preferred adjuvants for eliciting a predominantly Th1-type response include, for example, a combination of monophosphoryl lipid A, preferably 3-de-O-acylated monophosphoryl lipid A, together with an aluminum salt. MPL® adjuvants are available from Corixa Corporation (Seattle, Wash.; see, for example, U.S. Pat. Nos. 4,436,727; 4,877,611; 4,866,034 and 4,912,094). CpG-containing oligonucleotides (in which the CpG dinucleotide is unmethylated) also induce a predominantly Th1 response. Such oligonucleotides are well known and are described, for example, in WO 96/02555, WO 99/33488 and U.S. Pat. Nos. 6,008,200 and 5,856,462. Immunostimulatory DNA sequences are also described, for example, by Sato et al., Science 273:352, 1996. Another preferred adjuvant comprises a saponin, such as Quil A, or derivatives thereof, including QS21 and QS7 (Aquila Biopharmaceuticals Inc., Framingham, Mass.); Escin; Digitonin; or Gypsophila or Chenopodium quinoa saponins. Other preferred formulations include more than one saponin in the adjuvant combinations of the present invention, for example combinations of at least two of the following group comprising QS21, QS7, Quil A, β-escin, or digitonin.

[1237] Alternatively the saponin formulations may be combined with vaccine vehicles composed of chitosan or other polycationic polymers, polylactide and polylactide-co-glycolide particles, poly-N-acetyl glucosamine-based polymer matrix, particles composed of polysaccharides or chemically modified polysaccharides, liposomes and lipid-based particles, particles composed of glycerol monoesters, etc. The saponins may also be formulated in the presence of cholesterol to form particulate structures such as liposomes or ISCOMs. Furthermore, the saponins may be formulated together with a polyoxyethylene ether or ester, in either a non-particulate solution or suspension, or in a particulate structure such as a paucilamelar liposome or ISCOM. The saponins may also be formulated with excipients such as CarbopoI^{R} to increase viscosity, or may be formulated in a dry powder form with a powder excipient such as lactose.

[1238] In one preferred embodiment, the adjuvant system includes the combination of a monophosphoryl lipid A and a saponin derivative, such as the combination of QS21 and 3D-MPL® adjuvant, as described in WO 94/00153, or a less reactogenic composition where the QS21 is quenched with cholesterol, as described in WO 96/33739. Other preferred formulations comprise an oil-in-water emulsion and tocopherol. Another particularly preferred adjuvant formulation employing QS21, 3D-MPL® adjuvant and tocopherol in an oil-in-water emulsion is described in WO 95/17210.

[1239] Another enhanced adjuvant system involves the combination of a CpG-containing oligonucleotide and a saponin derivative particularly the combination of CpG and QS21 is disclosed in WO 00/09159. Preferably the formulation additionally comprises an oil in water emulsion and tocopherol.

[1240] Additional illustrative adjuvants for use in the pharmaceutical compositions of the invention include Montanide ISA 720 (Seppic, France), SAF (Chiron, Calif., United States), ISCOMS (CSL), MF-59 (Chiron), the SBAS series of adjuvants (e.g., SBAS-2 or SBAS-4, available from SmithKline Beecham, Rixensart, Belgium), Detox (Enhanzyn®) (Corixa, Hamilton, Mont.), RC-529 (Corixa, Hamilton, Mont.) and other aminoalkyl glucosaminide 4-phosphates (AGPs), such as those described in pending U.S. patent application Ser. Nos. 08/853,826 and 09/074,720, the disclosures of which are incorporated herein by reference in their entireties, and polyoxyethylene ether adjuvants such as those described in WO 99/52549A1.

[1241] Other preferred adjuvants include adjuvant molecules of the general formula

HO(CH₂CH₂O)ₙ—A—R, (I)

[1242] wherein, n is 1-50, A is a bond or —C(O)—, R is C₁₋₅₀ alkyl or Phenyl C₁₋₅₀ alkyl.

[1243] One embodiment of the present invention consists of a vaccine formulation comprising a polyoxyethylene ether of general formula (I), wherein n is between 1 and 50, preferably 4-24, most preferably 9; the R component is C₁₋₅₀, preferably C₄-C₂₀ alkyl and most preferably C₁₂ alkyl, and A is a bond. The concentration of the polyoxyethylene ethers should be in the range 0.1-20%, preferably from 0.1-10%, and most preferably in the range 0.1-1%. Preferred polyoxyethylene ethers are selected from the following group: polyoxyethylene-9-lauryl ether, polyoxyethylene-9-steoryl ether, polyoxyethylene-8-steoryl ether, polyoxyethylene-4-lauryl ether, polyoxyethylene-35-lauryl ether, and polyoxyethylene-23-lauryl ether. Polyoxyethylene ethers such as polyoxyethylene lauryl ether are described in the Merck index (12^{th} edition: entry 7717). These adjuvant molecules are described in WO 99/52549.

[1244] The polyoxyethylene ether according to the general formula (I) above may, if desired, be combined with another adjuvant. For example, a preferred adjuvant combination is preferably with CpG as described in the pending UK patent application GB 9820956.2.

[1245] According to another embodiment of this invention, an immunogenic composition described herein is delivered to a host via antigen presenting cells (APCs), such as dendritic cells, macrophages, B cells, monocytes and other cells that may be engineered to be efficient APCs. Such cells may, but need not, be genetically modified to increase the capacity for presenting the antigen, to improve activation and/or maintenance of the T cell response, to have anti-tumor effects per se and/or to be immunologically compatible with the receiver (i.e., matched HLA haplotype). APCs may generally be isolated from any of a variety of biological fluids and organs, including tumor and peritumoral tissues, and may be autologous, allogeneic, syngeneic or xenogeneic cells.

[1246] Certain preferred embodiments of the present invention use dendritic cells or progenitors thereof as antigen-presenting cells. Dendritic cells are highly potent APCs (Banchereau and Steinman, Nature 392:245-251, 1998) and have been shown to be effective as a physiological adjuvant for eliciting prophylactic or therapeutic antitumor immunity (see Timmerman and Levy, Ann. Rev. Med. 50:507-529, 1999). In general, dendritic cells may be identified based on their typical shape (stellate in situ, with marked cytoplasmic processes (dendrites) visible in vitro), their ability to take up, process and present antigens with high efficiency and their ability to activate naive T cell responses. Dendritic cells may, of course, be engineered to express specific cell-surface receptors or ligands that are not commonly found on dendritic cells in vivo or ex vivo, and such modified dendritic cells are contemplated by the present invention. As an alternative to dendritic cells, secreted vesicles antigen-loaded dendritic cells (called exosomes) may be used within a vaccine (see Zitvogel et al., Nature Med. 4:594-600, 1998).

[1247] Dendritic cells and progenitors may be obtained from peripheral blood, bone marrow, tumor-infiltrating cells, peritumoral tissues-infiltrating cells, lymph nodes, spleen, skin, umbilical cord blood or any other suitable tissue or fluid. For example, dendritic cells may be differentiated ex vivo by adding a combination of cytokines such as GM-CSF, IL-4, IL-13 and/or TNFα to cultures of monocytes harvested from peripheral blood. Alternatively, CD34 positive cells harvested from peripheral blood, umbilical cord blood or bone marrow may be differentiated into dendritic cells by adding to the culture medium combinations of GM-CSF, IL-3, TNFα, CD40 ligand, LPS, flt3 ligand and/or other compound(s) that induce differentiation, maturation and proliferation of dendritic cells.

[1248] Dendritic cells are conveniently categorized as “immature” and “mature” cells, which allows a simple way to discriminate between two well characterized phenotypes. However, this nomenclature should not be construed to exclude all possible intermediate stages of differentiation. Immature dendritic cells are characterized as APC with a high capacity for antigen uptake and processing, which correlates with the high expression of Fcy receptor and mannose receptor. The mature phenotype is typically characterized by a lower expression of these markers, but a high expression of cell surface molecules responsible for T cell activation such as class I and class II MHC, adhesion molecules (e.g., CD54 and CD11) and costimulatory molecules (e.g., CD40, CD80, CD86 and 4-1BB).

[1249] APCs may generally be transfected with a polynucleotide of the invention (or portion or other variant thereof) such that the encoded polypeptide, or an immunogenic portion thereof, is expressed on the cell surface. Such transfection may take place ex vivo, and a pharmaceutical composition comprising such transfected cells may then be used for therapeutic purposes, as described herein. Alternatively, a gene delivery vehicle that targets a dendritic or other antigen presenting cell may be administered to a patient, resulting in transfection that occurs in vivo. In vivo and ex vivo transfection of dendritic cells, for example, may generally be performed using any methods known in the art, such as those described in WO 97/24447, or the gene gun approach described by Mahvi et al., Immunology and cell Biology 75:456-460, 1997. Antigen loading of dendritic cells may be achieved by incubating dendritic cells or progenitor cells with the tumor polypeptide, DNA (naked or within a plasmid vector) or RNA; or with antigen-expressing recombinant bacterium or viruses (e.g., vaccinia, fowlpox, adenovirus or lentivirus vectors). Prior to loading, the polypeptide may be covalently conjugated to an immunological partner that provides T cell help (e g., a carrier molecule). Alternatively, a dendritic cell may be pulsed with a non-conjugated immunological partner, separately or in the presence of the polypeptide.

[1250] While any suitable carrier known to those of ordinary skill in the art may be employed in the pharmaceutical compositions of this invention, the type of carrier will typically vary depending on the mode of administration. Compositions of the present invention may be formulated for any appropriate manner of administration, including for example, topical, oral, nasal, mucosal, intravenous, intracranial, intraperitoneal, subcutaneous and intramuscular administration.

[1251] Carriers for use within such pharmaceutical compositions are biocompatible, and may also be biodegradable. In certain embodiments, the formulation preferably provides a relatively constant level of active component release. In other embodiments, however, a more rapid rate of release immediately upon administration may be desired. The formulation of such compositions is well within the level of ordinary skill in the art using known techniques. Illustrative carriers useful in this regard include microparticles of poly(lactide-co-glycolide), polyacrylate, latex, starch, cellulose, dextran and the like. Other illustrative delayed-release carriers include supramolecular biovectors, which comprise a non-liquid hydrophilic core (e.g., a cross-linked polysaccharide or oligosaccharide) and, optionally, an external layer comprising an amphiphilic compound, such as a phospholipid (see e.g., U.S. Pat. No. 5,151,254 and PCT applications WO 94/20078, WO/94/23701 and WO 96/06638). The amount of active compound contained within a sustained release formulation depends upon the site of implantation, the rate and expected duration of release and the nature of the condition to be treated or prevented.

[1252] In another illustrative embodiment, biodegradable microspheres (e.g., polylactate polyglycolate) are employed as carriers for the compositions of this invention. Suitable biodegradable microspheres are disclosed, for example, in U.S. Pat. Nos. 4,897,268; 5,075,109; 5,928,647; 5,811,128; 5,820,883; 5,853,763; 5,814,344, 5,407,609 and 5,942,252. Modified hepatitis B core protein carrier systems. such as described in WO/99 40934, and references cited therein, will also be useful for many applications. Another illustrative carrier/delivery system employs a carrier comprising particulate-protein complexes, such as those described in U.S. Pat. No. 5,928,647, which are capable of inducing a class I-restricted cytotoxic T lymphocyte responses in a host.

[1253] The pharmaceutical compositions of the invention will often further comprise one or more buffers (e.g., neutral buffered saline or phosphate buffered saline), carbohydrates (e.g., glucose, mannose, sucrose or dextrans), mannitol, proteins, polypeptides or amino acids such as glycine, antioxidants, bacteriostats, chelating agents such as EDTA or glutathione, adjuvants (e.g., aluminum hydroxide), solutes that render the formulation isotonic, hypotonic or weakly hypertonic with the blood of a recipient, suspending agents, thickening agents and/or preservatives. Alternatively, compositions of the present invention may be formulated as a lyophilizate.

[1254] The pharmaceutical compositions described herein may be presented in unit-dose or multi-dose containers, such as sealed ampoules or vials. Such containers are typically sealed in such a way to preserve the sterility and stability of the formulation until use. In general, formulations may be stored as suspensions, solutions or emulsions in oily or aqueous vehicles. Alternatively, a pharmaceutical composition may be stored in a freeze-dried condition requiring only the addition of a sterile liquid carrier immediately prior to use.

[1255] The development of suitable dosing and treatment regimens for using the particular compositions described herein in a variety of treatment regimens, including e.g., oral, parenteral, intravenous, intranasal, and intramuscular administration and formulation, is well known in the art, some of which are briefly discussed below for general purposes of illustration.

[1256] In certain applications, the pharmaceutical compositions disclosed herein may be delivered via oral administration to an animal. As such, these compositions may be formulated with an inert diluent or with an assimilable edible carrier, or they may be enclosed in hard- or soft-shell gelatin capsule, or they may be compressed into tablets, or they may be incorporated directly with the food of the diet.

[1257] The active compounds may even be incorporated with excipients and used in the form of ingestible tablets, buccal tables, troches, capsules, elixirs, suspensions, syrups, wafers, and the like (see, for example, Mathiowitz et al., Nature Mar. 27, 1997;386(6623):410-4; Hwang et al., Crit Rev Ther Drug Carrier Syst 1998;15(3):243-84; U.S. Pat. No. 5,641,515; U.S. Pat. No. 5,580,579 and U.S. Pat. No. 5,792,451). Tablets, troches, pills, capsules and the like may also contain any of a variety of additional components, for example, a binder, such as gum tragacanth, acacia, cornstarch, or gelatin; excipients, such as dicalcium phosphate; a disintegrating agent, such as corn starch, potato starch, alginic acid and the like; a lubricant, such as magnesium stearate; and a sweetening agent, such as sucrose, lactose or saccharin may be added or a flavoring agent, such as peppermint, oil of wintergreen, or cherry flavoring. When the dosage unit form is a capsule, it may contain, in addition to materials of the above type, a liquid carrier. Various other materials may be present as coatings or to otherwise modify the physical form of the dosage unit. For instance, tablets, pills, or capsules may be coated with shellac, sugar, or both. Of course, any material used in preparing any dosage unit form should be pharmaceutically pure and substantially non-toxic in the amounts employed. In addition, the active compounds may be incorporated into sustained-release preparation and formulations.

[1258] Typically, these formulations will contain at least about 0.1% of the active compound or more, although the percentage of the active ingredient(s) may, of course, be varied and may conveniently be between about 1 or 2% and about 60% or 70% or more of the weight or volume of the total formulation. Naturally, the amount of active compound(s) in each therapeutically useful composition may be prepared is such a way that a suitable dosage will be obtained in any given unit dose of the compound. Factors such as solubility, bioavailability, biological half-life, route of administration, product shelf life, as well as other pharmacological considerations will be contemplated by one skilled in the art of preparing such pharmaceutical formulations, and as such, a variety of dosages and treatment regimens may be desirable.

[1259] For oral administration the compositions of the present invention may alternatively be incorporated with one or more excipients in the form of a mouthwash, dentifrice, buccal tablet, oral spray, or sublingual orally-administered formulation. Alternatively, the active ingredient may be incorporated into an oral solution such as one containing sodium borate, glycerin and potassium bicarbonate, or dispersed in a dentifrice, or added in a therapeutically-effective amount to a composition that may include water, binders, abrasives, flavoring agents, foaming agents, and humectants. Alternatively the compositions may be fashioned into a tablet or solution form that may be placed under the tongue or otherwise dissolved in the mouth.

[1260] In certain circumstances it will be desirable to deliver the pharmaceutical compositions disclosed herein parenterally, intravenously, intramuscularly, or even intraperitoneally. Such approaches are well known to the skilled artisan, some of which are further described, for example, in U.S. Pat. No. 5,543,158; U.S. Pat. No. 5,641,515 and U.S. Pat. No. 5,399,363. In certain embodiments, solutions of the active compounds as free base or pharmacologically acceptable salts may be prepared in water suitably mixed with a surfactant, such as hydroxypropylcellulose. Dispersions may also be prepared in glycerol, liquid polyethylene glycols, and mixtures thereof and in oils. Under ordinary conditions of storage and use, these preparations generally will contain a preservative to prevent the growth of microorganisms.

[1261] Illustrative pharmaceutical forms suitable for injectable use include sterile aqueous solutions or dispersions and sterile powders for the extemporaneous preparation of sterile injectable solutions or dispersions (for example, see U.S. Pat. No. 5,466,468). In all cases the form must be sterile and must be fluid to the extent that easy syringability exists. It must be stable under the conditions of manufacture and storage and must be preserved against the contaminating action of microorganisms, such as bacteria and fungi. The carrier can be a solvent or dispersion medium containing, for example, water, ethanol, polyol (e.g., glycerol, propylene glycol, and liquid polyethylene glycol, and the like), suitable mixtures thereof, and/or vegetable oils. Proper fluidity may be maintained, for example, by the use of a coating, such as lecithin, by the maintenance of the required particle size in the case of dispersion and/or by the use of surfactants. The prevention of the action of microorganisms can be facilitated by various antibacterial and antifungal agents, for example, parabens, chlorobutanol, phenol, sorbic acid, thimerosal, and the like. In many cases, it will be preferable to include isotonic agents, for example, sugars or sodium chloride. Prolonged absorption of the injectable compositions can be brought about by the use in the compositions of agents delaying absorption, for example, aluminum monostearate and gelatin.

[1262] In one embodiment, for parenteral administration in an aqueous solution, the solution should be suitably buffered if necessary and the liquid diluent first rendered isotonic with sufficient saline or glucose. These particular aqueous solutions are especially suitable for intravenous, intramuscular, subcutaneous and intraperitoneal administration. In this connection, a sterile aqueous medium that can be employed will be known to those of skill in the art in light of the present disclosure. For example, one dosage may be dissolved in 1 ml of isotonic NaCl solution and either added to 1000 ml of hypodermoclysis fluid or injected at the proposed site of infusion, (see for example, “Remington's Pharmaceutical Sciences” 15th Edition, pages 1035-1038 and 1570-1580). Some variation in dosage will necessarily occur depending on the condition of the subject being treated. Moreover, for human administration, preparations will of course preferably meet sterility, pyrogenicity, and the general safety and purity standards as required by FDA Office of Biologics standards.

[1263] In another embodiment of the invention, the compositions disclosed herein may be formulated in a neutral or salt form. Illustrative pharmaceutically-acceptable salts include the acid addition salts (formed with the free amino groups of the protein) and which are formed with inorganic acids such as, for example, hydrochloric or phosphoric acids, or such organic acids as acetic, oxalic, tartaric, mandelic, and the like. Salts formed with the free carboxyl groups can also be derived from inorganic bases such as, for example, sodium, potassium, ammonium, calcium, or ferric hydroxides, and such organic bases as isopropylamine, trimethylamine, histidine, procaine and the like. Upon formulation, solutions will be administered in a manner compatible with the dosage formulation and in such amount as is therapeutically effective.

[1264] The carriers can further comprise any and all solvents, dispersion media, vehicles, coatings, diluents, antibacterial and antifungal agents, isotonic and absorption delaying agents, buffers, carrier solutions, suspensions, colloids, and the like. The use of such media and agents for pharmaceutical active substances is well known in the art. Except insofar as any conventional media or agent is incompatible with the active ingredient, its use in the therapeutic compositions is contemplated. Supplementary active ingredients can also be incorporated into the compositions. The phrase “pharmaceutically-acceptable” refers to molecular entities and compositions that do not produce an allergic or similar untoward reaction when administered to a human.

[1265] In certain embodiments, the pharmaceutical compositions may be delivered by intranasal sprays, inhalation, and/or other aerosol delivery vehicles. Methods for delivering genes, nucleic acids, and peptide compositions directly to the lungs via nasal aerosol sprays has been described, e.g., in U.S. Pat. No. 5,756,353 and U.S. Pat. No. 5,804,212. Likewise, the delivery of drugs using intranasal microparticle resins (Takenaga et al., J. Controlled Release Mar. 2, 1998;52(1-2):81-7) and lysophosphatidyl-glycerol compounds (U.S. Pat. No. 5,725,871) are also well-known in the pharmaceutical arts. Likewise, illustrative transmucosal drug delivery in the form of a polytetrafluoroetheylene support matrix is described in U.S. Pat. No. 5,780,045.

[1266] In certain embodiments, liposomes, nanocapsules, microparticles, lipid particles, vesicles, and the like, are used for the introduction of the compositions of the present invention into suitable host cells/organisms. In particular, the compositions of the present invention may be formulated for delivery either encapsulated in a lipid particle, a liposome, a vesicle, a nanosphere, or a nanoparticle or the like. Alternatively, compositions of the present invention can be bound, either covalently or non-covalently, to the surface of such carrier vehicles.

[1267] The formation and use of liposome and liposome-like preparations as potential drug carriers is generally known to those of skill in the art (see for example, Lasic, Trends Biotechnol Jul. 16, 1998(7):307-21; Takakura, Nippon Rinsho Mar. 56, 1998(3):691-5; Chandran et al., Indian J Exp Biol. Aug. 35, 1997(8):801-9; Margalit, Crit Rev Ther Drug Carrier Syst. 1995;12(2-3):233-61; U.S. Pat. No. 5,567,434; U.S. Pat. No. 5,552,157; U.S. Pat. No. 5,565,213; U.S. Pat. No. 5,738,868 and U.S. Pat. No. 5,795,587, each specifically incorporated herein by reference in its entirety).

[1268] Liposomes have been used successfully with a number of cell types that are normally difficult to transfect by other procedures, including T cell suspensions, primary hepatocyte cultures and PC 12 cells (Renneisen et al, J Biol Chem. Sep. 25, 1990;265(27):16337-42; Muller et al., DNA Cell Biol. Apr. 9, 1990(3):221-9). In addition, liposomes are free of the DNA length constraints that are typical of viral-based delivery systems. Liposomes have been used effectively to introduce genes, various drugs, radiotherapeutic agents, enzymes, viruses, transcription factors, allosteric effectors and the like, into a variety of cultured cell lines and animals. Furthermore, he use of liposomes does not appear to be associated with autoimmune responses or unacceptable toxicity after systemic delivery.

[1269] In certain embodiments, liposomes are formed from phospholipids that are dispersed in an aqueous medium and spontaneously form multilamellar concentric bilayer vesicles (also termed multilamellar vesicles (MLVs).

[1270] Alternatively, in other embodiments, the invention provides for pharmaceutically-acceptable nanocapsule formulations of the compositions of the present invention. Nanocapsules can generally entrap compounds in a stable and reproducible way (see, for example, Quintanar-Guerrero et al., Drug Dev Ind Pharm. Dec. 24, 1998(12):1113-28). To avoid side effects due to intracellular polymeric overloading, such ultrafine particles (sized around 0.1 μm) may be designed using polymers able to be degraded in vivo. Such particles can be made as described, for example, by Couvreur et al., Crit. Rev. Ther Drug Carrier Syst. 1988;5(1):1-20; zur Muhlen et al., Eur. J. Pharm Biopharm. Mar. 45, 1998(2):149-55; Zambaux et al. J Controlled Release. Jan. 2, 1998;50(1-3):31-40; and U.S. Pat. No. 5,145,684.

[1271] Cancer Therapeutic Methods

[1272] Immunologic approaches to cancer therapy are based on the recognition that cancer cells can often evade the body's defenses against aberrant or foreign cells and molecules, and that these defenses might be therapeutically stimulated to regain the lost ground, e.g. pgs. 623-648 in Klein, Immunology (Wiley-Interscience, New York, 1982). Numerous recent observations that various immune effectors can directly or indirectly inhibit growth of tumors has led to renewed interest in this approach to cancer therapy, e.g. Jager, et al., Oncology 2001;60(1):1-7; Renner, et al., Ann Hematol Dec. 79, 2000(12):651-9.

[1273] Four-basic cell types whose function has been associated with antitumor cell immunity and the elimination of tumor cells from the body are: i) B-lymphocytes which secrete immunoglobulins into the blood plasma for identifying and labeling the nonself invader cells; ii) monocytes which secrete the complement proteins that are responsible for lysing and processing the immunoglobulin-coated target invader cells; iii) natural killer lymphocytes having two mechanisms for the destruction of tumor cells, antibody-dependent cellular cytotoxicity and natural killing; and iv) T-lymphocytes possessing antigen-specific receptors and having the capacity to recognize a tumor cell carrying complementary marker molecules (Schreiber, H., 1989, in Fundamental Immunology (ed). W. E. Paul, pp. 923-955).

[1274] Cancer immunotherapy generally focuses on inducing humoral immune responses, cellular immune responses, or both. Moreover, it is well established that induction of CD4⁺ T helper cells is necessary in order to secondarily induce either antibodies or cytotoxic CD8⁺ T cells. Polypeptide antigens that are selective or ideally specific for cancer cells, particularly lung cancer cells, offer a powerful approach for inducing immune responses against lung cancer, and are an important aspect of the present invention.

[1275] Therefore, in further aspects of the present invention, the pharmaceutical compositions described herein may be used for the treatment of cancer, particularly for the immunotherapy of lung cancer. Within such methods, the pharmaceutical compositions described herein are administered to a patient, typically a warm-blooded animal, preferably a human. A patient may or may not be afflicted with cancer. Accordingly, the above pharmaceutical compositions may be used to prevent the development of a cancer or to treat a patient afflicted with a cancer. Pharmaceutical compositions and vaccines may be administered either prior to or following surgical removal of primary tumors and/or treatment such as administration of radiotherapy or conventional chemotherapeutic drugs. As discussed above, administration of the pharmaceutical compositions may be by any suitable method, including administration by intravenous, intraperitoneal, intramuscular, subcutaneous, intranasal, intradermal, anal, vaginal, topical and oral routes.

[1276] Within certain embodiments, immunotherapy may be active immunotherapy, in which treatment relies on the in vivo stimulation of the endogenous host immune system to react against tumors with the administration of immune response-modifying agents (such as polypeptides and polynucleotides as provided herein).

[1277] Within other embodiments, immunotherapy may be passive immunotherapy, in which treatment involves the delivery of agents with established tumor-immune reactivity (such as effector cells or antibodies) that can directly or indirectly mediate antitumor effects and does not necessarily depend on an intact host immune system. Examples of effector cells include T cells as discussed above, T lymphocytes (such as CD8⁺ cytotoxic T lymphocytes and CD4⁺ T-helper tumor-infiltrating lymphocytes), killer cells (such as Natural Killer cells and lymphokine-activated killer cells), B cells and antigen-presenting cells (such as dendritic cells and macrophages) expressing a polypeptide provided herein. T cell receptors and antibody receptors specific for the polypeptides recited herein may be cloned, expressed and transferred into other vectors or effector cells for adoptive immunotherapy. The polypeptides provided herein may also be used to generate antibodies or anti-idiotypic antibodies (as described above and in U.S. Pat. No. 4,918,164) for passive immunotherapy.

[1278] Monoclonal antibodies may be labeled with any of a variety of labels for desired selective usages in detection, diagnostic assays or therapeutic applications (as described in U.S. Pat. Nos. 6,090,365; 6,015,542; 5,843,398; 5,595,721; and 4,708,930, hereby incorporated by reference in their entirety as if each was incorporated individually). In each case, the binding of the labelled monoclonal antibody to the determinant site of the antigen will signal detection or delivery of a particular therapeutic agent to the antigenic determinant on the non-normal cell. A further object of this invention is to provide the specific monoclonal antibody suitably labelled for achieving such desired selective usages thereof.

[1279] Effector cells may generally be obtained in sufficient quantities for adoptive immunotherapy by growth in vitro, as described herein. Culture conditions for expanding single antigen-specific effector cells to several billion in number with retention of antigen recognition in vivo are well known in the art. Such in vitro culture conditions typically use intermittent stimulation with antigen, often in the presence of cytokines (such as IL-2) and non-dividing feeder cells. As noted above, immunoreactive polypeptides as provided herein may be used to rapidly expand antigen-specific T cell cultures in order to generate a sufficient number of cells for immunotherapy. In particular, antigen-presenting cells, such as dendritic, macrophage, monocyte, fibroblast and/or B cells, may be pulsed with immunoreactive polypeptides or transfected with one or more polynucleotides using standard techniques well known in the art. For example, antigen-presenting cells can be transfected with a polynucleotide having a promoter appropriate for increasing expression in a recombinant virus or other expression system. Cultured effector cells for use in therapy must be able to grow and distribute widely, and to survive long term in vivo. Studies have shown that cultured effector cells can be induced to grow in vivo and to survive long term in substantial numbers by repeated stimulation with antigen supplemented with IL-2 (see, for example, Cheever et al., Immunological Reviews 157:177, 1997).

[1280] Alternatively, a vector expressing a polypeptide recited herein may be introduced into antigen presenting cells taken from a patient and clonally propagated ex vivo for transplant back into the same patient. Transfected cells may be reintroduced into the patient using any means known in the art, preferably in sterile form by intravenous, intracavitary, intraperitoneal or intratumor administration.

[1281] Routes and frequency of administration of the therapeutic compositions described herein, as well as dosage, will vary from individual to individual, and may be readily established using standard techniques. In general, the pharmaceutical compositions and vaccines may be administered by injection (e.g., intracutaneous, intramuscular, intravenous or subcutaneous), intranasally (e.g., by aspiration) or orally. Preferably, between 1 and 10 doses may be administered over a 52 week period. Preferably, 6 doses are administered, at intervals of 1 month, and booster vaccinations may be given periodically thereafter. Alternate protocols may be appropriate for individual patients. A suitable dose is an amount of a compound that, when administered as described above, is capable of promoting an anti-tumor immune response, and is at least 10-50% above the basal (i.e., untreated) level. Such response can be monitored by measuring the anti-tumor antibodies in a patient or by vaccine-dependent generation of cytolytic effector cells capable of killing the patient's tumor cells in vitro. Such vaccines should also be capable of causing an immune response that leads to an improved clinical outcome (e.g., more frequent remissions, complete or partial or longer disease-free survival) in vaccinated patients as compared to non-vaccinated patients. In general, for pharmaceutical compositions and vaccines comprising one or more polypeptides, the amount of each polypeptide present in a dose ranges from about 25 μg to 5 mg per kg of host. Suitable dose sizes will vary with the size of the patient, but will typically range from about 0.1 mL to about 5 mL.

[1282] In general, an appropriate dosage and treatment regimen provides the active compound(s) in an amount sufficient to provide therapeutic and/or prophylactic benefit. Such a response can be monitored by establishing an improved clinical outcome (e.g., more frequent remissions, complete or partial, or longer disease-free survival) in treated patients as compared to non-treated patients. Increases in preexisting immune responses to a tumor protein generally correlate with an improved clinical outcome. Such immune responses may generally be evaluated using standard proliferation, cytotoxicity or cytokine assays, which may be performed using samples obtained from a patient before and after treatment.

[1283] Cancer Detection and Diagnostic Compositions, Methods and Kits

[1284] In general, a cancer may be detected in a patient based on the presence of one or more lung tumor proteins and/or polynucleotides encoding such proteins in a biological sample (for example, blood, sera, sputum urine and/or tumor biopsies) obtained from the patient. In other words, such proteins may be used as markers to indicate the presence or absence of a cancer such as lung cancer. In addition, such proteins may be useful for the detection of other cancers. The binding agents provided herein generally permit detection of the level of antigen that binds to the agent in the biological sample.

[1285] Polynucleotide primers and probes may be used to detect the level of mRNA encoding a tumor protein, which is also indicative of the presence or absence of a cancer. In general, a tumor sequence should be present at a level that is at least two-fold, preferably three-fold, and more preferably five-fold or higher in tumor tissue than in normal tissue of the same type from which the tumor arose. Expression levels of a particular tumor sequence in tissue types different from that in which the tumor arose are irrelevant in certain diagnostic embodiments since the presence of tumor cells can be confirmed by observation of predetermined differential expression levels, e.g., 2-fold, 5-fold, etc, in tumor tissue to expression levels in normal tissue of the same type.

[1286] Other differential expression patterns can be utilized advantageously for diagnostic purposes. For example, in one aspect of the invention, overexpression of a tumor sequence in tumor tissue and normal tissue of the same type, but not in other normal tissue types, e.g. PBMCs, can be exploited diagnostically. In this case, the presence of metastatic tumor cells, for example in a sample taken from the circulation or some other tissue site different from that in which the tumor arose, can be identified and/or confirmed by detecting expression of the tumor sequence in the sample, for example using RT-PCR analysis. In many instances, it will be desired to enrich for tumor cells in the sample of interest, e.g., PBMCs, using cell capture or other like techniques.

[1287] There are a variety of assay formats known to those of ordinary skill in the art for using a binding agent to detect polypeptide markers in a sample. See, e.g., Harlow and Lane, Antibodies: A Laboratory Manual, Cold Spring Harbor Laboratory, 1988. In general, the presence or absence of a cancer in a patient may be determined by (a) contacting a biological sample obtained from a patient with a binding agent; (b) detecting in the sample a level of polypeptide that binds to the binding agent; and (c) comparing the level of polypeptide with a predetermined cut-off value.

[1288] In a preferred embodiment, the assay involves the use of binding agent immobilized on a solid support to bind to and remove the polypeptide from the remainder of the sample. The bound polypeptide may then be detected using a detection reagent that contains a reporter group and specifically binds to the binding agent/polypeptide complex. Such detection reagents may comprise, for example, a binding agent that specifically binds to the polypeptide or an antibody or other agent that specifically binds to the binding agent, such as an anti-immunoglobulin, protein G, protein A or a lectin. Alternatively, a competitive assay may be utilized, in which a polypeptide is labeled with a reporter group and allowed to bind to the immobilized binding agent after incubation of the binding agent with the sample. The extent to which components of the sample inhibit the binding of the labeled polypeptide to the binding agent is indicative of the reactivity of the sample with the immobilized binding agent. Suitable polypeptides for use within such assays include full length lung tumor proteins and polypeptide portions thereof to which the binding agent binds, as described above.

[1289] The solid support may be any material known to those of ordinary skill in the art to which the tumor protein may be attached. For example, the solid support may be a test well in a microtiter plate or a nitrocellulose or other suitable membrane. Alternatively, the support may be a bead or disc, such as glass, fiberglass, latex or a plastic material such as polystyrene or polyvinylchloride. The support may also be a magnetic particle or a fiber optic sensor, such as those disclosed, for example, in U.S. Pat. No. 5,359,681. The binding agent may be immobilized on the solid support using a variety of techniques known to those of skill in the art, which are amply described in the patent and scientific literature. In the context of the present invention, the term “immobilization” refers to both noncovalent association, such as adsorption, and covalent attachment (which may be a direct linkage between the agent and functional groups on the support or may be a linkage by way of a cross-linking agent). Immobilization by adsorption to a well in a microtiter plate or to a membrane is preferred. In such cases, adsorption may be achieved by contacting the binding agent, in a suitable buffer, with the solid support for a suitable amount of time. The contact time varies with temperature, but is typically between about 1 hour and about 1 day. In general, contacting a well of a plastic microtiter plate (such as polystyrene or polyvinylchloride) with an amount of binding agent ranging from about 10 ng to about 10 μg, and preferably about 100 ng to about 1 μg, is sufficient to immobilize an adequate amount of binding agent.

[1290] Covalent attachment of binding agent to a solid support may generally be achieved by first reacting the support with a bifunctional reagent that will react with both the support and a functional group, such as a hydroxyl or amino group, on the binding agent. For example, the binding agent may be covalently attached to supports having an appropriate polymer coating using benzoquinone or by condensation of an aldehyde group on the support with an amine and an active hydrogen on the binding partner (see, e.g., Pierce Immunotechnology Catalog and Handbook, 1991, at A12-A13).

[1291] In certain embodiments, the assay is a two-antibody sandwich assay. This assay may be performed by first contacting an antibody that has been immobilized on a solid support, commonly the well of a microtiter plate, with the sample, such that polypeptides within the sample are allowed to bind to the immobilized antibody. Unbound sample is then removed from the immobilized polypeptide-antibody complexes and a detection reagent (preferably a second antibody capable of binding to a different site on the polypeptide) containing a reporter group is added. The amount of detection reagent that remains bound to the solid support is then determined using a method appropriate for the specific reporter group.

[1292] More specifically, once the antibody is immobilized on the support as described above, the remaining protein binding sites on the support are typically blocked. Any suitable blocking agent known to those of ordinary skill in the art, such as bovine serum albumin or Tween 20™ (Sigma Chemical Co., St. Louis, Mo.). The immobilized antibody is then incubated with the sample, and polypeptide is allowed to bind to the antibody. The sample may be diluted with a suitable diluent, such as phosphate-buffered saline (PBS) prior to incubation. In general, an appropriate contact time (i.e., incubation time) is a period of time that is sufficient to detect the presence of polypeptide within a sample obtained from an individual with lung cancer. Preferably, the contact time is sufficient to achieve a level of binding that is at least about 95% of that achieved at equilibrium between bound and unbound polypeptide. Those of ordinary skill in the art will recognize that the time necessary to achieve equilibrium may be readily determined by assaying the level of binding that occurs over a period of time. At room temperature, an incubation time of about 30 minutes is generally sufficient.

[1293] Unbound sample may then be removed by washing the solid support with an appropriate buffer, such as PBS containing 0.1% Tween 20™. The second antibody, which contains a reporter group, may then be added to the solid support. Preferred reporter groups include those groups recited above.

[1294] The detection reagent is then incubated with the immobilized antibody-polypeptide complex for an amount of time sufficient to detect the bound polypeptide. An appropriate amount of time may generally be determined by assaying the level of binding that occurs over a period of time. Unbound detection reagent is then removed and bound detection reagent is detected using the reporter group, The method employed for detecting the reporter group depends upon the nature of the reporter group. For radioactive groups, scintillation counting or autoradiographic methods are generally appropriate. Spectroscopic methods may be used to detect dyes., luminescent groups and fluorescent groups. Biotin may be detected using avidin, coupled to a different reporter group (commonly a radioactive or fluorescent group or an enzyme). Enzyme reporter groups may generally be detected by the addition of substrate (generally for a specific period of time), followed by spectroscopic or other analysis of the reaction products.

[1295] To determine the presence or absence of a cancer, such as lung cancer, the signal detected from the reporter group that remains bound to the solid support is generally compared to a signal that corresponds to a predetermined cut-off value. In one preferred embodiment, the cut-off value for the detection of a cancer is the average mean signal obtained when the immobilized antibody is incubated with samples from patients without the cancer. In general, a sample generating a signal that is three standard deviations above the predetermined cut-off value is considered positive for the cancer. In an alternate preferred embodiment, the cut-off value is determined using a Receiver Operator Curve, according to the method of Sackett et al., Clinical Epidemiology: A Basic Science for Clinical Medicine, Little Brown and Co., 1985, p. 106-7. Briefly, in this embodiment, the cut-off value may be determined from a plot of pairs of true positive rates (i.e., sensitivity) and false positive rates (1 00%-specificity) that correspond to each possible cut-off value for the diagnostic test result. The cut-off value on the plot that is the closest to the upper left-hand comer (i.e., the value that encloses the largest area) is the most accurate cut-off value, and a sample generating a signal that is higher than the cut-off value determined by this method may be considered positive. Alternatively, the cut-off value may be shifted to the left along the plot, to minimize the false positive rate, or to the right, to minimize the false negative rate. In general, a sample generating a signal that is higher than the cut-off value determined by this method is considered positive for a cancer.

[1296] In a related embodiment, the assay is performed in a flow-through or strip test format, wherein the binding agent is immobilized on a membrane, such as nitrocellulose. In the flow-through test, polypeptides within the sample bind to the immobilized binding agent as the sample passes through the membrane. A second, labeled binding agent then binds to the binding agent-polypeptide complex as a solution containing the second binding agent flows through the membrane. The detection of bound second binding agent may then be performed as described above. In the strip test format, one end of the membrane to which binding agent is bound is immersed in a solution containing the sample. The sample migrates along the membrane through a region containing second binding agent and to the area of immobilized binding agent. Concentration of second binding agent at the area of immobilized antibody indicates the presence of a cancer. Typically, the concentration of second binding agent at that site generates a pattern, such as a line, that can be read visually. The absence of such a pattern indicates a negative result. In general, the amount of binding agent immobilized on the membrane is selected to generate a visually discernible pattern when the biological sample contains a level of polypeptide that would be sufficient to generate a positive signal in the two-antibody sandwich assay, in the format discussed above. Preferred binding agents for use in such assays are antibodies and antigen-binding fragments thereof. Preferably, the amount of antibody immobilized on the membrane ranges from about 25 ng to about 1 μg, and more preferably from about 50 ng to about 500 ng. Such tests can typically be performed with a very small amount of biological sample.

[1297] Of course, numerous other assay protocols exist that are suitable for use with the tumor proteins or binding agents of the present invention. The above descriptions are intended to be exemplary only. For example, it will be apparent to those of ordinary skill in the art that the above protocols may be readily modified to use tumor polypeptides to detect antibodies that bind to such polypeptides in a biological sample. The detection of such tumor protein specific antibodies may correlate with the presence of a cancer.

[1298] A cancer may also, or alternatively, be detected based on the presence of T cells that specifically react with a tumor protein in a biological sample. Within certain methods, a biological sample comprising CD4⁺ and/or CD8⁺ T cells isolated from a patient is incubated with a tumor polypeptide, a polynucleotide encoding such a polypeptide and/or an APC that expresses at least an immunogenic portion of such a polypeptide, and the presence or absence of specific activation of the T cells is detected. Suitable biological samples include, but are not limited to, isolated T cells. For example, T cells may be isolated from a patient by routine techniques (such as by Ficoll/Hypaque density gradient centrifugation of peripheral blood lymphocytes). T cells may be incubated in vitro for 2-9 days (typically 4 days) at 37° C. with polypeptide (e.g., 5-25 μg/ml). It may be desirable to incubate another aliquot of a T cell sample in the absence of tumor polypeptide to serve as a control. For CD4⁺ T cells, activation is preferably detected by evaluating proliferation of the T cells. For CD8⁺ T cells, activation is preferably detected by evaluating cytolytic activity. A level of proliferation that is at least two fold greater and/or a level of cytolytic activity that is at least 20% greater than in disease-free patients indicates the presence of a cancer in the patient.

[1299] As noted above, a cancer may also, or alternatively, be detected based on the level of mRNA encoding a tumor protein in a biological sample. For example, at least two oligonucleotide primers may be employed in a polymerase chain reaction (PCR) based assay to amplify a portion of a tumor cDNA derived from a biological sample, wherein at least one of the oligonucleotide primers is specific for (i.e., hybridizes to) a polynucleotide encoding the tumor protein. The amplified cDNA is then separated and detected using techniques well known in the art, such as gel electrophoresis.

[1300] Similarly, oligonucleotide probes that specifically hybridize to a polynucleotide encoding a tumor protein may be used in a hybridization assay to detect the presence of polynucleotide encoding the tumor protein in a biological sample.

[1301] To permit hybridization under assay conditions, oligonucleotide primers and probes should comprise an oligonucleotide sequence that has at least about 60%, preferably at least about 75% and more preferably at least about 90%, identity to a portion of a polynucleotide encoding a tumor protein of the invention that is at least 10 nucleotides, and preferably at least 20 nucleotides, in length. Preferably, oligonucleotide primers and/or probes hybridize to a polynucleotide encoding a polypeptide described herein under moderately stringent conditions, as defined above. Oligonucleotide primers and/or probes which may be usefully employed in the diagnostic methods described herein preferably are at least 10-40 nucleotides in length. In a preferred embodiment, the oligonucleotide primers comprise at least 10 contiguous nucleotides, more preferably at least 15 contiguous nucleotides, of a DNA molecule having a sequence as disclosed herein. Techniques for both PCR based assays and hybridization assays are well known in the art (see, for example, Mullis et al., Cold Spring Harbor Symp. Quant. Biol., 51:263, 1987; Erlich ed., PCR Technology, Stockton Press, NY, 1989).

[1302] One preferred assay employs RT-PCR, in which PCR is applied in conjunction with reverse transcription. Typically, RNA is extracted from a biological sample, such as biopsy tissue, and is reverse transcribed to produce cDNA molecules. PCR amplification using at least one specific primer generates a cDNA molecule, which may be separated and visualized using, for example, gel electrophoresis. Amplification may be performed on biological samples taken from a test patient and from an individual who is not afflicted with a cancer. The amplification reaction may be performed on several dilutions of cDNA spanning two orders of magnitude. A two-fold or greater increase in expression in several dilutions of the test patient sample as compared to the same dilutions of the non-cancerous sample is typically considered positive.

[1303] In another aspect of the present invention, cell capture technologies may be used in conjunction, with, for example, real-time PCR to provide a more sensitive tool for detection of metastatic cells expressing lung tumor antigens. Detection of lung cancer cells in biological samples, e.g., bone marrow samples, peripheral blood, and small needle aspiration samples is desirable for diagnosis and prognosis in lung cancer patients.

[1304] Immunomagnetic beads coated with specific monoclonal antibodies to surface cell markers, or tetrameric antibody complexes, may be used to first enrich or positively select cancer cells in a sample. Various commercially available kits may be used, including Dynabeads® Epithelial Enrich (Dynal Biotech, Oslo, Norway), StemSep™ (StemCell Technologies, Inc., Vancouver, BC), and RosetteSep (StemCell Technologies). A skilled artisan will recognize that other methodologies and kits may also be used to enrich or positively select desired cell populations. Dynabeads® Epithelial Enrich contains magnetic beads coated with MAbs specific for two glycoprotein membrane antigens expressed on normal and neoplastic epithelial tissues. The coated beads may be added to a sample and the sample then applied to a magnet, thereby capturing the cells bound to the beads. The unwanted cells are washed away and the magnetically isolated cells eluted from the beads and used in further analyses.

[1305] RosetteSep can be used to enrich cells directly from a blood sample and consists of a cocktail of tetrameric antibodies that targets a variety of unwanted cells and crosslinks them to glycophorin A on red blood cells (RBC) present in the sample, forming rosettes. When centrifuged over Ficoll, targeted cells pellet along with the free RBC. The combination of antibodies in the depletion cocktail determines which cells will be removed and consequently which cells will be recovered. Antibodies that are available include, but are not limited to: CD2, CD3, CD4, CD5, CD8, CD10, CD11b, CD14, CD15, CD16, CD19, CD20, CD24, CD25, CD29, CD33, CD34, CD36, CD38, CD41, CD45, CD45RA, CD45RO, CD56, CD66B, CD66e, HLA-DR, IgE, and TCRαβ.

[1306] Additionally, it is contemplated in the present invention that MAbs specific for lung tumor antigens can be generated and used in a similar manner. For example, MAbs that bind to tumor-specific cell surface antigens may be conjugated to magnetic beads, or formulated in a tetrameric antibody complex, and used to enrich or positively select metastatic lung tumor cells from a sample. Once a sample is enriched or positively selected, cells may be lysed and RNA isolated. RNA may then be subjected to RT-PCR analysis using lung tumor-specific primers in a real-time PCR assay as described herein. One skilled in the art will recognize that enriched or selected populations of cells may be analyzed by other methods (e.g. in situ hybridization or flow cytometry).

[1307] In another embodiment, the compositions described herein may be used as markers for the progression of cancer. In this embodiment, assays as described above for the diagnosis of a cancer may be performed over time, and the change in the level of reactive polypeptide(s) or polynucleotide(s) evaluated. For example, the assays may be performed every 24-72 hours for a period of 6 months to 1 year, and thereafter performed as needed. In general, a cancer is progressing in those patients in whom the level of polypeptide or polynucleotide detected increases over time. In contrast, the cancer is not progressing when the level of reactive polypeptide or polynucleotide either remains constant or decreases with time.

[1308] Certain in vivo diagnostic assays may be performed directly on a tumor. One such assay involves contacting tumor cells with a binding agent. The bound binding agent may then be detected directly or indirectly via a reporter group. Such binding agents may also be used in histological applications. Alternatively, polynucleotide probes may be used within such applications.

[1309] As noted above, to improve sensitivity, multiple tumor protein markers may be assayed within a given sample. It will be apparent that binding agents specific for different proteins provided herein may be combined within a single assay. Further, multiple primers or probes may be used concurrently. The selection of tumor protein markers may be based on routine experiments to determine combinations that results in optimal sensitivity. In addition, or alternatively, assays for tumor proteins provided herein may be combined with assays for other known tumor antigens.

[1310] The present invention further provides kits for use within any of the above diagnostic methods. Such kits typically comprise two or more components necessary for performing a diagnostic assay. Components may be compounds, reagents, containers and/or equipment. For example, one container within a kit may contain a monoclonal antibody or fragment thereof that specifically binds to a tumor protein. Such antibodies or fragments may be provided attached to a support material, as described above. One or more additional containers may enclose elements, such as reagents or buffers, to be used in the assay. Such kits may also, or alternatively, contain a detection reagent as described above that contains a reporter group suitable for direct or indirect detection of antibody binding.

[1311] Alternatively, a kit may be designed to detect the level of mRNA encoding a tumor protein in a biological sample. Such kits generally comprise at least one oligonucleotide probe or primer, as described above, that hybridizes to a polynucleotide encoding a tumor protein. Such an oligonucleotide may be used, for example, within a PCR or hybridization assay. Additional components that may be present within such kits include a second oligonucleotide and/or a diagnostic reagent or container to facilitate the detection of a polynucleotide encoding a tumor protein.

[1312] The following Examples are offered by way of illustration and not by way of limitation.

### EXAMPLE 1

### Identification and Characterization of Lung Tumor cDNAS

[1313] This Example illustrates the identification of cDNA molecules encoding lung tumor proteins.

[1314] A. Isolation of cDNA Sequences from Lung Adenocarcinoma Libraries using Conventional cDNA Library Subtraction

[1315] A human lung adenocarcinoma cDNA expression library was constructed from poly A⁺ RNA from patient tissues (#40031486) using a Superscript Plasmid System for cDNA Synthesis and Plasmid Cloning kit (BRL Life Technologies, Gaithersburg, Md.) following the manufacturer's protocol. Specifically, lung carcinoma tissues were homogenized with polytron (Kinematica, Switzerland) and total RNA was extracted using Trizol reagent (BRL Life Technologies) as directed by the manufacturer. The poly A⁺ RNA was then purified using an oligo dT cellulose column as described in Sambrook et al., Molecular Cloning: A Laboratory Manual, Cold Spring Harbor Laboratories, Cold Spring Harbor, N.Y., 1989. First-strand cDNA was synthesized using the NotI/Oligo-dT18 primer. Double-stranded cDNA was synthesized, ligated with BstXI/EcoRI adaptors (Invitrogen, San Diego, Calif.) and digested with NotI. Following size fractionation with cDNA size fractionation columns (BRL Life Technologies), the cDNA was ligated into the BstXI/NotI site of pcDNA3.1 (Invitrogen) and transformed into ElectroMax E. coli DH10B cells (BRL Life Technologies) by electroporation. A total of 3×10⁶ independent colonies were generated.

[1316] Using the same procedure, a normal human cDNA expression library was prepared from a panel of normal tissue specimens, including lung, liver, pancreas, skin, kidney, brain and resting PBMC.

[1317] cDNA library subtraction was performed using the above lung adenocarcinoma and normal tissue cDNA libraries, as described by Hara et al. (Blood, 84:189-199, 1994) with some modifications. Specifically, a lung adenocarcinoma-specific subtracted cDNA library was generated as follows. The normal tissue cDNA library (80 μg) was digested with BamHI and XhoI, followed by a filling-in reaction with DNA polymerase Klenow fragment. After phenol-chloroform extraction and ethanol precipitation, the DNA was dissolved in 133 μl of H₂O, heat-denatured and mixed with 133 μl (133 μg) of Photoprobe biotin (Vector Laboratories, Burlingame, Calif.). As recommended by the manufacturer, the resulting mixture was irradiated with a 270 W sunlamp on ice for 20 minutes. Additional Photoprobe biotin (67 μl) was added and the biotinylation reaction was repeated. After extraction with butanol five times, the DNA was ethanol-precipitated and dissolved in 23 μl H₂O. The resulting DNA, plus other highly redundant cDNA clones that were frequently recovered in previous lung subtractions formed the driver DNA.

[1318] To form the tracer DNA, 10 μg lung adenocarcinoma cDNA library was digested with NotI and Spel, phenol chloroform extracted and passed through Chroma spin-400 columns (Clontech, Palo Alto, Calif.). Typically, 5 μg of cDNA was recovered after the sizing column. Following ethanol precipitation, the tracer DNA was dissolved in 5 μl H₂O. Tracer DNA was mixed with 15 μl driver DNA and 20 μl of 2×hybridization buffer (1.5 M NaCl/10 mM EDTA/50 mM HEPES pH 7.5/0.2% sodium dodecyl sulfate), overlaid with mineral oil, and heat-denatured completely. The sample was immediately transferred into a 68° C. water bath and incubated for 20 hours (long hybridization [LH]). The reaction mixture was then subjected to a streptavidin treatment followed by phenol/chloroform extraction. This process was repeated three more times. Subtracted DNA was precipitated, dissolved in 12 μl H₂O, mixed with 8 μl driver DNA and 20 μl of 2×hybridization buffer, and subjected to a hybridization at 68° C. for 2 hours (short hybridization [SH]). After removal of biotinylated double-stranded DNA, subtracted cDNA was ligated into NotI/Spel site of chloramphenicol resistant pBCSK+(Stratagene, La Jolla, Calif.) and transformed into ElectroMax E. coli DH10B cells by electroporation to generate a lung adenocarcinoma specific subtracted cDNA library, referred to as LAT-S1 Similarly, LAT-S2 was generated by including 23 genes that were over-expressed in the tracer as additional drivers.

[1319] A second human lung adenocarcinoma cDNA expression library was constructed using adenocarcinoma tissue from a second patient (#86-66) and used to prepare a second lung adenocarcinoma-specific subtracted cDNA library (referred to as LAT2-S2), as described above, using the same panel of normal tissues and the additional genes over-expressed in LAT-S1.

[1320] A third human metastatic lung adenocarcinoma library was constructed from a pool of two lung pleural effusions with lung and gastric adenocarcinoma origins. The subtracted cDNA library, referred to as Mets-sub2, was generated as described above using the same panel of normal tissues. The Mets-sub3 subtracted library was constructed by including 51 additional genes as drivers. These 51 genes were recovered in Mets-sub2, representing over-expressed housekeeping genes in the testers.

[1321] A total of 16 cDNA fragments isolated from LAT-S 1, 585 cDNA fragments isolated from LAT-S2, 568 cDNA clones from LAT2-S2, 15 cDNA clones from Mets-sub2 and 343 cDNA clones from Mets-sub3, described above, were colony PCR amplified and their mRNA expression levels in lung tumor, normal lung, and various other normal and tumor tissues were determined using microarray technology (Incyte, Palo Alto, Calif.). Briefly, the PCR amplification products were dotted onto slides in an array format, with each product occupying a unique location in the array. mRNA was extracted from the tissue sample to be tested, reverse transcribed, and fluorescent-labeled cDNA probes were generated. The microarrays were probed with the labeled cDNA probes, the slides scanned and fluorescence intensity was measured. This intensity correlates with the hybridization intensity. Seventy-three non-redundant cDNA clones, of which 42 were found to be unique, showed over-expression in lung tumors, with expression in normal tissues tested (lung, skin, lymph node, colon, liver, pancreas, breast, heart, bone marrow, large intestine, kidney, stomach, brain, small intestine, bladder and salivary gland) being either undetectable, or at significantly lower levels compared to lung adenocarcinoma tumors. These clones were further characterized by DNA sequencing with a Perkin Elmer/Applied Biosystems Division Automated Sequencer Model 373A and/or Model 377 (Foster City, Calif.).

[1322] The sequences were compared to known sequences in the gene bank using the EMBL GenBank databases (release 96). No significant homologies were found to the sequence provided in SEQ ID NO: 67, with no apparent homology to previously identified expressed sequence tags (ESTs). The sequences of SEQ ID NO: 60, 62, 65, 66, 69-71, 74, 76, 79, 80, 84, 86, 89-92, 95, 97 and 98 were found to show some homology to previously identified expressed sequence tags (ESTs). The cDNA sequences of SEQ ID NO: 59, 61, 63, 64, 67, 68, 72, 73, 75, 77, 78, 81-83, 85, 87, 88, 93, 94, 96, 99 and 100 showed homology to previously identified genes. The full-length cDNA sequences for the clones of SEQ ID NO: 96 and 100 are provided in SEQ ID NO: 316 and 318, respectively. The amino acid sequences for the clones of SEQ ID NO: 59, 61, 63, 64, 68, 73, 82, 83, 94, 96 and 100 are provided in SEQ ID NO: 331, 328, 329, 332, 327, 333, 330, 326, 325, 324 and 335, respectively. The amino acid sequence encoded by the sequence of SEQ ID NO: 69 (referred to as L552S) is provided in SEQ ID NO: 786.

[1323] Further studies led to the isolation of an extended cDNA sequence and the open reading frame for L552S (SEQ ID NO: 790). The amino acid sequence encoded by the cDNA sequence of SEQ ID NO: 790 is provided in SEQ ID NO: 791. Subsequent studies led to the isolation of the full-length cDNA sequence of L552S (SEQ ID NO: 808). The full-length cDNA of L552S has an open-reading frame of 480 base pairs (SEQ ID NO: 790) and encodes a putative polypeptide of 160 amino acids (SEQ ID NO: 809).

[1324] Initial database searches failed to detect any sequence homology with proteins in the database, suggesting that L552S encodes a novel protein of unknown function. Recently, a cancer-testis antigen, XAGE-1, was found to be over-expressed in Ewing's Sarcoma (Liu et al., 2000 Cancer Res. 60:4752-4755). The determined cDNA sequence of XAGE-1 is provided in SEQ ID NO: 792 with the corresponding amino acid sequence being provided in SEQ ID NO: 793. A sequence comparison of L552S and XAGE-1 reveals striking identities as well as differences. The majority of the C-terminal sequences are identical to each other. The polypeptides predicted from L552S and XAGE-1 have diverged N-terminal sequences. Hydrophilicity analysis of the L552S amino acids suggested a very hydrophilic protein with no transmembrane domains predicted. PSORT analysis of L552S revealed the same result. Since L552S is also localized in chromosome X, it is likely to be a new isoform of cancer testis antigen, XAGE-1. The genomic sequence analysis revealed that both genes localized in the same region of the X chromosome and both have four exons. The last three exons are identical for L552S and XAGE-1. However, the first exon for XAGE-1 is upstream of the first exon for L552S and this results in distinct 5′ nucleotide and amino acid sequences for L552S and XAGE-1. Therefore, L552S and XAGE-1 are alternatively spliced isoforms.

[1325] The amino acid sequence of this N-terminal portion of L552S is provided in SEQ ID NO: 1830 with the corresponding cDNA sequence being provided in SEQ ID NO: 1826. The cDNA sequences provided in SEQ ID NO: 1827-1829 represent bp 394-681 of SEQ ID NO: 808, bp394-534 of SEQ ID NO: 808 and bp 214-394 of SEQ ID NO: 792, respectively, with the corresponding amino acid sequences being provided in SEQ ID NO: 1831-1833, respectively.

[1326] Full-length cloning efforts on L552S also led to the isolation of three additional cDNA sequences (SEQ ID NO: 810-812; referred to as clones 50989, 50990 and 50992, respectively) from a metastatic lung adenocarcinoma library. The sequence of SEQ ID NO: 810 was found to show some homology to previously identified human DNA sequences. The sequence of SEQ ID NO: 811 was found to show some homology to a previously identified DNA sequence. The sequence of SEQ ID NO: 812 was found to show some homology to previously identified ESTs.

[1327] The gene of SEQ ID NO: 84 (referred to as L55 IS) was determined by real-time RT-PCR analysis to be over-expressed in 2/9 primary adenocarcinomas and to be expressed at lower levels in 2/2 metastatic adenocarcinomas and ½ squamous cell carcinomas. No expression was observed in normal tissues, with the exception of very low expression in normal stomach. Further studies on L551S led to the isolation of the 5′ and 3′ cDNA consensus sequences provided in SEQ ID NO: 801 and 802, respectively. The L551S 5′ sequence was found to show some homology to the previously identified gene STY8 (cDNA sequence provided in SEQ ID NO: 803; corresponding amino acid sequence provided in SEQ ID NO: 805), which is a mitogen activated protein kinase phosphatase. However, no significant homologies were found to the 3′ sequence of L551S. Subsequently, an extended cDNA sequence for L551S was isolated (SEQ ID NO: 804). The corresponding amino acid sequence is provided in SEQ ID NO: 806. Further studies led to the isolation of two independent full-length clones for L551S (referred to as 54298 and 54305). These two clones have five nucleotide differences compared to the STY8 DNA sequence. Two of these differences are single nucleotide polymorphisms which do not effect the encoded amino acid sequences. The other three nucleotide differences are consistent between the two L551S clones but lead to encoded amino acid sequences that are different from the STY8 protein sequence. The determined cDNA sequences for the L551S full-length clones 54305 and 54298 are provided in SEQ ID NO: 825 and 826, respectively, with the amino acid sequence for L551S being provided in SEQ ID NO: 827.

[1328] B. Isolation of cDNA Sequences from Lung Adenocarcinoma Libraries using PCR-Based cDNA Library Subtraction

[1329] cDNA clones from a subtracted library, containing cDNA from a pool of two human lung primary adenocarcinomas subtracted against a pool of nine normal human tissue cDNAs including skin, colon, lung, esophagus, brain, kidney, spleen, pancreas and liver, (Clontech, Palo Alto, Calif.) were submitted to a first round of PCR amplification This library (referred to as ALT-1) was subjected to a second round of PCR amplification, following the manufacturer's protocol. The expression levels of 760 cDNA clones in lung tumor, normal lung, and various other normal and tumor tissues, were examined using microarray technology as described above. A total of 118 clones, of which 55 were unique, were found to be over-expressed in lung tumor tissue, with expression in normal tissues tested (lung, skin, lymph node, colon, liver, pancreas, breast, heart, bone marrow, large intestine, kidney, stomach, brain, small intestine, bladder and salivary gland) being either undetectable, or at significantly lower levels. The sequences were compared to known sequences in the gene bank using the EMBL and GenBank databases (release 96). No significant homologies (including ESTs) were found to the sequence provided in SEQ ID NO: 44. The sequences of SEQ ID NO: 1, 11, 13, 15, 20, 23-27, 29, 30, 33, 34, 39, 41, 43, 45, 46, 51 and 57 were found to show some homology to previously identified expressed sequence tags (ESTs). The cDNA sequences of SEQ ID NO: 2-10, 12, 14, 16-19, 21, 22, 28, 31, 32, 35-38, 40, 42, 44, 47-50, 52-56 and 58 showed homology to previously identified genes. The full-length cDNA sequences for the clones of SEQ ID NO: 18, 22, 31, 35, 36 and 42 are provided in SEQ ID NO: 320, 319, 323, 321, 317, 321 and 322, respectively, with the corresponding amino acid sequences being provided in SEQ ID NO: 337, 336, 340, 338, 334, and 339, respectively.

[1330] Further studies led to the isolation of an extended cDNA sequence for the clone of SEQ ID NO: 33 (referred to as L801P). This extended cDNA sequence (provided in SEQ ID NO: 796), was found to contain three potential open reading frames (ORFs). The predicted amino acid sequences encoded by these three ORFs are provided in SEQ ID NO: 797-799, respectively. Additional full-length cloning efforts led to still further extended cDNA sequence for L801P, set forth in SEQ ID NO: 1669, in addition to five potential open reading frames (referred to as ORFs 4-9; SEQ ID NO: 1670-1675, respectively) encoded by the extended cDNA sequence. L801P was mapped to chromosomal region 20p13 and a 137 amino acid ORF from this genomic region was identified that corresponds to ORF4 (SEQ ID NO: 1670), suggesting that this is likely an authentic ORF for L801P.

[1331] By microarray analysis, L801P was found to be overexpressed by 2-fold or greater in lung tumor tissue compared to normal tissue. By real-time PCR analysis, greater than 50% of lung adenocarcinoma and greater than 30% of lung squamous cell carcinoma tumor samples tested had elevated L801P expression relative to normal lung tissue. Of those that displayed elevated L801P, the level of expression was greater than 10-fold higher than in normal lung tissue samples. Moreover, low or no expression of L801P was detected in an extensive panel of normal tissue RNAs.

[1332] L801P expression was also detected in a number of other tumor types, including breast, prostate, ovarian and colon tumors, and thus may have diagnostic and/or therapeutic utility in these cancer types.

[1333] In subsequent studies, a full-length cDNA sequence for the clone of SEQ ID NO: 44 (referred to as L844P) was isolated (provided in SEQ ID NO: 800). Comparison of this sequence with those in the public databases revealed that the 470 bases at the 5′ end of the sequence show homology to the known gene dihydrodiol dehydrogenase, thus indicating that L844P is a novel transcript of the dihydrodiol dehydrogenase family having 2007 base pairs of previously unidentified 3′ untranslated region.

[1334] The predicted amino acid sequence encoded by the sequence of SEQ ID NO: 46 (referred to as L840P) is provided in SEQ ID NO: 787. An extended cDNA sequence for L840P, which was determined to include an open reading frame, is provided in SEQ ID NO: 794. The predicted amino acid sequence encoded by the cDNA sequence of SEQ ID NO: 794 is provided in SEQ ID NO: 795. The full-length cDNA sequence for the clone of SEQ ID NO: 54 (referred to as L548S) is provided in SEQ ID NO: 788, with the corresponding amino acid sequence being provided in SEQ ID NO: 789.

[1335] Northern blot analyses of the genes of SEQ ID NO: 25 and 46 (referred to as L839P and L840P, respectively) were remarkably similar. Both genes were expressed in ½ lung adenocarcinomas as two bands of 3.6 kb and 1.6 kb. No expression of L839P was observed in normal lung or trachea. No expression of L840P was observed in normal bone marrow, resting or activated PBMC, esophagus, or normal lung. Given the similar expression patterns, L839P and L840P may be derived from the same gene.

[1336] Additional lung adenocarcinoma cDNA clones were isolated as follows. A cDNA library was prepared from a pool of two lung adenocarcinomas and subtracted against cDNA from a panel of normal tissues including lung, brain, liver, kidney, pancreas, skin, heart and spleen. The subtraction was performed using a PCR-based protocol (Clontech), which was modified to generate larger fragments. Within this protocol, tester and driver double stranded cDNA were separately digested with five restriction enzymes that recognize six-nucleotide restriction sites (Mlul, MscI, PvuII, SalI and Stul). This digestion resulted in an average cDNA size of 600 bp, rather than the average size of 300 bp that results from digestion with RsaI according to the Clontech protocol. The ends of the restriction digested tester cDNA were filled in to generate blunt ends for adapter ligation. This modification did not affect the subtraction efficiency. Two tester populations were then created with different adapters, and the driver library remained without adapters. The tester and driver libraries were then hybridized using excess driver cDNA. In the first hybridization step, driver was separately hybridized with each of the two tester cDNA populations. This resulted in populations of (a) unhybridized tester cDNAs, (b) tester cDNAs hybridized to other tester cDNAs, (c) tester cDNAs hybridized to driver cDNAs and (d) unhybridized driver cDNAs. The two separate hybridization reactions were then combined, and rehybridized in the presence of additional denatured driver cDNA. Following this second hybridization, in addition to populations (a) through (d), a fifth population (e) was generated in which tester cDNA with one adapter hybridized to tester cDNA with the second adapter. Accordingly, the second hybridization step resulted in enrichment of differentially expressed sequences which could be used as templates for PCR amplification with adaptor-specific primers.

[1337] The ends were then filled in, and PCR amplification was performed using adaptor-specific primers. Only population (e), which contained tester cDNA that did not hybridize to driver cDNA, was amplified exponentially. A second PCR amplification step was then performed, to reduce background and further enrich differentially expressed sequences.

[1338] Fifty-seven cDNA clones were isolated from the subtracted library (referred to as LAP1) and sequenced. The determined cDNA sequences for 16 of these clones are provided in SEQ ID NO: 101-116. The sequences of SEQ ID NO: 101 and 114 showed no significant homologies to previously identified sequences. The sequences of SEQ ID NO: 102-109 and 112 showed some similarity to previously identified sequences, while the sequences of SEQ ID NO: 113, 115 and 116 showed some similarity to previously isolated ESTs.

[1339] An additional 502 clones analyzed from the LAPI library were sequenced and the determined cDNA sequences are shown in SEQ ID NO: 828-1239 and 1564-1653.

[1340] C. Isolation of cDNA Sequences from Small Cell Lung Carcinoma Libraries using PCR-Based cDNA Library Subtraction

[1341] A subtracted cDNA library for small cell lung carcinoma (referred to as SCLI) was prepared essentially using the modified PCR-based subtraction process described above. cDNA from small cell lung carcinoma was subtracted against cDNA from a panel of normal tissues, including normal lung, brain, kidney, liver, pancreas, skin, heart, lymph node and spleen. Both tester and driver poly A+ RNA were initially amplified using SMART PCR cDNA synthesis kit (Clontech, Palo Alto, Calif.). The tester and driver double stranded cDNA were separately digested with five restriction enzymes (Dral, MscI, PvuIl, Smal, and Stul). These restriction enzymes generated blunt end cuts and the digestion resulted in an average insert size of 600 bp. Digestion with this set of restriction enzymes eliminates the step required to generate blunt ends by filling in of the cDNA ends. These modifications did not affect subtraction efficiency.

[1342] Eighty-five clones were isolated and sequenced. The determined cDNA sequences for 31 of these clones are provided in SEQ ID NO: 117-147. The sequences of SEQ ID NO: 122, 124, 126, 127, 130, 131, 133, 136, 139 and 147 showed no significant homologies to previously identified sequences. The sequences of SEQ ID NO: 120, 129, 135, 137, 140, 142, 144 and 145 showed some similarity to previously identified gene sequences, while the sequences of SEQ ID NO: 114, 118, 119, 121, 123, 125, 128, 132, 134, 138, 141, 143 and 147 showed some similarity to previously isolated ESTs.

[1343] In further studies, three additional cDNA libraries were generated from poly A+ RNA from a single small cell lung carcinoma sample subtracted against a pool of poly A+ RNA from nine normal tissues (lung, brain, kidney, liver, pancreas, skin, heart pituitary gland and spleen). For the first library (referred to as SCL2), the subtraction was carried out essentially as described above for the LAP1 library, with the exception that the tester and driver were digested with PvuII, Stul, MscI and Dral. The ratio of tester and driver cDNA used was as recommended by Clontech. For the second library (referred to as SCL3), subtraction was performed essentially as for SCL2 except that cDNA for highly redundant clones identified from the SCL2 library was included in the driver GDNA. Construction of the SCL4 library was performed essentially as described for the SCL3 library except that a higher ratio of driver to tester was employed.

[1344] Each library was characterized by DNA sequencing and database analyses. The determined cDNA sequence for 35 clones isolated from the SCL2 library are provided in SEQ ID NO: 245-279, with the determined cDNA sequences for 21 clones isolated from the SCL3 library and for 15 clones isolated from the SCL4 library being provided in SEQ ID NO: 280-300 and 301-315, respectively. The sequences of SEQ ID NO: 246, 254, 261, 262, 304, 309 and 311 showed no significant homologies to previously identified sequences. The sequence of SEQ ID NO: 245, 248, 255, 266, 270, 275, 280, 282, 283, 288-290, 292, 295, 301 and 303 showed some homology to previously isolated ESTs, while the sequences of SEQ ID NO: 247, 249-253, 256-260, 263-265, 267-269, 271-274, 276-279, 281, 284-287, 291, 293, 294, 296-300, 302, 305-308, 310 and 312-315 showed some homology to previously identified gene sequences.

[1345] Sequences disclosed herein were firtjer evaluated for overexpression in specific tumor tissues by microarray analysis. Using this approach, cDNA sequences were PCR amplified and their mRNA expression profiles in tumor and normal tissues were examined using cDNA microarray technology essentially as described (Shena, M. et al., 1995 Science 270:467-70). In brief, the clones were arrayed onto glass slides as multiple replicas, with each location corresponding to a unique cDNA clone (as many as 5500 clones can be arrayed on a single slide or chip). Each chip was hybridized with a pair of cDNA probes that are fluorescence-labeled with Cy3 and Cy5, respectively. Typically, 1 μg of polyA⁺ RNA was used to generate each cDNA probe. After hybridization, the chips were scanned and the fluorescence intensity recorded for both Cy3 and Cy5 channels. There were multiple built-in quality control steps. First, the probe quality was monitored using a panel of ubiquitously expressed genes. Secondly, the control plate also can include yeast DNA fragments of which complementary RNA may be spiked into the probe synthesis for measuring the quality of the probe and the sensitivity of the analysis. Currently, the technology offers a sensitivity of 1 in 100,000 copies of mRNA. Finally, the reproducibility of this technology can be ensured by including duplicated control cDNA elements at different locations.

[1346] 3264 cDNA clones from three PCR-based subtracted cDNA libraries were analyzed by the above cDNA microarray technology. The cDNA clones were arrayed on Lung Chip 5. Of the these cDNA clones, 960 clones came from SQLI library, 768 clones came from SCLI library, and 1536 clones came from SCL3 and SCL4 libraries. Thirty-five pairs of fluorescent labeled cDNA probes were used for the microarray analysis. Each probe pair included a lung tumor probe paired with a normal tissue probe. The expression data was analyzed. 498 cDNA clones were found to be overexpressed by 2-fold or greater in the small cell and/or non-small cell lung tumor probe groups compared to the normal tissue probe group. Also, the mean expression values for these clones in normal tissues were below 0.1 (range of expression is from 0.001 to 10). The cDNA sequences disclosed in SEQ ID NO: 1240-1563 represent 324 non-redundant clones.

[1347] The following sequences were novel based on database analysis including GenBank and GeneSeq: SEQ ID NOs: 1240, 1243, 1247, 1269, 1272, 1280, 1283, 1285, 1286, 1289, 1300, 1309, 1318, 1319, 1327, 1335, 1339, 1346, 1359, 1369, 1370, 1371, 1393, 1398, 1405, 1408, 1413, 1414, 1417, 1422, 1429, 1432, 1435, 1436, 1438-1442, 1447, 1450, 1453, 1463, 1467, 1470, 1473, 1475, 1482, 1486, 1491-1494, 1501, 1505, 1506, 1514-1517, 1520, 1522, 1524, 1535, 1538, 1542, 1543, 1547, 1554, 1557, 1559, 1561, and 1563.

[1348] The extended cDNA sequence of the partial sequence of contig 139 (SEQ ID NO: 1467), also known as L985P, was predicted by searching public databases using SEQ ID NO: 1467 as a query. By this approach, it was found that SEQ ID NO: 1467 had homology to a cDNA sequence (SEQ ID NO: 1676) which encodes the cell surface immunomodulator-2 (CSIMM-2). The EDNA sequence of SEQ ID NO: 1676 encodes a protein having the sequence set forth in SEQ ID NO: 1677.

[1349] By microarray analysis, L985P was overexpressed by 2-fold or greater in the lung tumor probe groups compared to the normal tissue probe group. Moreover, the mean expression values for L985P in normal tissues was below 0.2 (range of expression was from 0.01 to 10). By real-time PCR analysis, greater than 40% of small cell lung carcinoma lung tumor samples tested had elevated L985P expression relative to normal lung tissue. Of those that displayed elevated L985P, the level of expression was greater than 3-fold higher than in normal lung tissue samples. Low or no expression of L985P was detected in an extensive panel of normal tissue RNAs. These findings for L985P support its use both as a diagnositic marker for detecting the presence of lung cancer in a patient and/or as an immunotherapeutic target for the treatment of lung cancer.

[1350] D. Isolation of cDNA Sequences from a Neuroendocrine Library using PCR-Based cDNA Library Subtraction

[1351] Using the modified PCR-based subtraction process, essentially as described above for the LAP1 subtracted library, a subtracted cDNA library (referred to as MLN1) was derived from a lung neuroendocrine carcinoma that had metastasized to the subcarinal lymph node, by subtraction with a panel of nine normal tissues, including normal lung, brain, kidney, liver, pancreas, skin, heart, lymph node and spleen.

[1352] Ninety-one individual clones were isolated and sequenced. The determined cDNA sequences for 58 of these clones are provided in SEQ ID NO: 147-222. The sequences of SEQ ID NO: 150, 151, 154, 157, 158, 159, 160, 163, 174, 175, 178, 186-190, 192, 193, 195-200, 208-210, 212-215 and 220 showed no significant homologies to previously identified sequences. The sequences of SEQ ID NO: 152, 155, 156, 161, 165, 166, 176, 179, 182, 184, 185, 191, 194, 221 and 222 showed some similarity to previously identified gene sequences, while the sequences of SEQ ID NO: 148, 149, 153, 164, 167-173, 177, 180, 181, 183, 201-207, 211 and 216-219 showed some similarity to previously isolated ESTs.

[1353] The determined cDNA sequences of an additional 442 clones isolated from the MLN1 library are provided in SEQ ID NO: 341-782, with the determined cDNA sequences of an additional 11 clones isolated from the MLNI library are provided in SEQ ID NO: 1654-1664.

[1354] E. Isolation of cDNA Sequences from a Squamous Cell Lung Carcinoma Library using PCR-Based cDNA Library Subtraction

[1355] A subtracted cDNA library for squamous cell lung carcinoma (referred to as SQL1) was prepared essentially using the modified PCR-based subtraction process described above, except the tester and driver double stranded cDNA were separately digested with four restriction enzymes (DraI, MscI, PvuII and StuI). cDNA from a pool of two squamous cell lung carcinomas was subtracted against cDNA from a pool of 10 normal tissues, including normal lung, brain, kidney, liver, pancreas, skin, heart, spleen, esophagus and trachea.

[1356] Seventy-four clones were isolated and sequenced. The determined cDNA sequences for 22 of these clones are provided in SEQ ID NO: 223-244. The sequence of SEQ ID NO: 241 showed no significant homologies to previously identified sequences. The sequences of SEQ ID NO: 223, 225, 232, 233, 235, 238, 239, 242 and 243 showed some similarity to previously identified gene sequences, while the sequences of SEQ ID NO: 224, 226-231, 234, 236, 237, 240, 241 and 244 showed some similarity to previously isolated ESTs.

[1357] The sequences of an additional 12 clones isolated during characterization of cDNA libraries prepared from lung tumor tissue are provided in SEQ ID NO: 813-824. Comparison of these sequences with those in the GenBank database and the GeneSeq DNA database revealed no significant homologies to previously identified sequences.

### EXAMPLE 2

### Synthesis of Polypeptides

[1358] Polypeptides may be synthesized on a Perkin Elmer/Applied Biosystems Division 430A peptide synthesizer using FMOC chemistry with HPTU (O-Benzotriazole-N,N,N′,N′-tetramethyluronium hexafluorophosphate) activation. A Gly-Cys-Gly sequence may be attached to the amino terminus of the peptide to provide a method of conjugation, binding to an immobilized surface, or labeling of the peptide. Cleavage of the peptides from the solid support may be carried out using the following cleavage mixture: trifluoroacetic acid:ethanedithiol:thioanisole:water:phenol (40:1:2:2:3). After cleaving for 2 hours, the peptides may be precipitated in cold methyl-t-butyl-ether. The peptide pellets may then be dissolved in water containing 0.1% trifluoroacetic acid (TFA) and lyophilized prior to purification by C18 reverse phase HPLC. A gradient of 0%-60% acetonitrile (containing 0.1% TFA) in water (containing 0.1% TFA) may be used to elute the peptides. Following lyophilization of the pure fractions, the peptides may be characterized using electrospray or other types of mass spectrometry and by amino acid analysis.

### EXAMPLE 3

### Expression in E. coli of L548S His Tag Fusion Protein

[1359] The L548S coding region was PCR amplified with the following primers:

[1360] Forward primer starting at amino acid 2:

[1361] PDM-433: 5′ gctaaaggtgaccccaagaaaccaaag 3′ Tm 60° C. (SEQ ID NO: 1665)

[1362] Reverse primer creating a XhoI site after the stop codon:

[1363] PDM-438: 5′ ctattaactcgagggagacagataaacagtttcttta 3′ Tm 61° C. (SEQ ID NO: 1666)

[1364] The PCR product was then digested with XhoI restriction enzyme, gel purified and then cloned into pPDM His, a modified pET28 vector with a His tag in frame, which had been digested with Eco721 and XhoI restriction enzymes. The correct construct was confirmed by DNA sequence analysis and then transformed into BL21 (DE3) pLys S and BL21 (DE3) CodonPlus RIL expression hosts. The protein sequence of expressed recombinant L548S is shown in SEQ ID NO: 1667, and the DNA sequence of expressed recombinant L7548S is shown in SEQ ID NO: 1668.

### EXAMPLE 4

### Additional Analyses of Lung Chip 5 SQL1, SCL1, SCL3 and SCL4 Libraries

[1365] Additional analyses were performed on lung chip 5 using a criteria of greater than or equal to 2-fold over-expression in tumor probe groups versus normal tissues and an average expression in normal tissues of less than or equal to 0.2. This resulted in the identification of 109 non-redundant clones that are over-expressed in lung carcinomas. As summarized in the Table 11 below, 19 cDNA clones were recovered from the lung squamous cell carcinoma subtracted library SQL1, 9 cDNA clones were recovered from the small cell lung carcinoma library SCL1, and 81 cDNA clones were recovered from the small cell lung carcinoma libraries SCL3 and SCL4.

TABLE 11

| SEQ ID NO: | Seq. Ref. | Element (384) | Element (96) | Ratio | Mean Signal 1 | Mean Signal 2 | Library |
|---|---|---|---|---|---|---|---|
| 1680 | 58456 | p0003r03c13 | R0001 E7 | 3.09 | 0.424 | 0.137 | SQL1 |
| 1681 | 58458 | p0003r03c10 | R0001 F5 | 2.31 | 0.408 | 0.176 | SQL1 |
| 1682 | 58462 | p0003r04c16 | R0001 H8 | 2.22 | 0.257 | 0.116 | SQL1 |
| 1683 | 58469 | p0003r07c12 | R0002 F6 | 2.1 | 0.289 | 0.138 | SQL1 |
| 1684 | 58470 | p0003r09c21 | R0003 A11 | 2.55 | 0.493 | 0.194 | SQL1 |
| 1685 | 58482 | p0003r12c19 | R0003 G10 | 2.16 | 0.36 | 0.167 | SQL1 |
| 1686 | 58485 | p0003r12c10 | R0003 H5 | 2.48 | 0.273 | 0.11 | SQL1 |
| 1687 | 58501 | p0004r04c23 | R0005 G12 | 2.04 | 0.26 | 0.128 | SQL1 |
| 1688 | 58502 | p0004r04c03 | R0005 G2 | 2.17 | 0.289 | 0.133 | SQL1 |
| 1689 | 58505 | p0004r05c23 | R0006 A12 | 3.08 | 0.454 | 0.148 | SQL1 |
| 1690 | 58507 | p0004r06c11 | R0006 C6 | 3.22 | 0.49 | 0.152 | SQL1 |
| 1691 | 58509 | p0004r07c15 | R0006 E8 | 3.26 | 0.421 | 0.129 | SQL1 |
| 1692 | 58512 | p0004r09c03 | R0007 A2 | 3.16 | 0.559 | 0.177 | SQL1 |
| 1693 | 58527 | p0004r12c22 | R0007 H11 | 2.03 | 0.278 | 0.137 | SQL1 |
| 1694 | 58529 | p0004r14c09 | R0008 C5 | 2.26 | 0.45 | 0.199 | SQL1 |
| 1695 | 58531 | p0004r16c01 | R0008 G1 | 2.84 | 0.387 | 0.136 | SQL1 |
| 1696 | 58537 | p0005r02c08 | R0009 D4 | 2.03 | 0.355 | 0.175 | SQL1 |
| 1697 | 58539 | p0005r03c08 | R0009 F4 | 2.34 | 0.42 | 0.18 | SQL1 |
| 1698 | 58545 | p0005r07c21 | R0010 E11 | 2.96 | 0.361 | 0.122 | SQL1 |
| 1699 | 59319 | p0005r10c04 | R0011 D2 | 3.1 | 0.478 | 0.154 | SCL1 |
| 1700 | 59322 | p0005r12c01 | R0011 G1 | 2.16 | 0.255 | 0.118 | SCL1 |
| 1701 | 59348 | p0006r11c12 | R0015 F6 | 2.33 | 0.269 | 0.116 | SCL1 |
| 1702 | 59350 | p0006r14c13 | R0016 C7 | 2.41 | 0.447 | 0.185 | SCL1 |
| 1703 | 59363 | p0007r02c16 | R0017 D8 | 2.12 | 0.421 | 0.199 | SCL1 |
| 1704 | 59365 | p0007r03c20 | R0017 F10 | 3.07 | 0.584 | 0.19 | SCL1 |
| 1705 | 59370 | p0007r04c10 | R0017 H5 | 2.06 | 0.284 | 0.138 | SCL1 |
| 1706 | 59373 | p0007r05c23 | R0018 A12 | 2.95 | 0.472 | 0.16 | SCL1 |
| 1707 | 59376 | p0007r06c02 | R0018 D1 | 2.13 | 0.246 | 0.116 | SCL1 |
| 1708 | 61050 | p0011r02c10 | R0033 D5 | 2.23 | 0.306 | 0.137 | SCL3/4 |
| 1709 | 61051 | p0011r03c23 | R0033 E12 | 2.9 | 0.298 | 0.103 | SCL3/4 |
| 1710 | 61052 | p0011r03c08 | R0033 F4 | 2.18 | 0.265 | 0.122 | SCL3/4 |
| 1711 | 61054 | p0011r03c16 | R0033 F8 | 2.11 | 0.415 | 0.197 | SCL3/4 |
| 1712 | 61056 | p0011r04c13 | R0033 G7 | 2.73 | 0.314 | 0.115 | SCL3/4 |
| 1713 | 61057 | p0011r04c10 | R0033 H5 | 2.45 | 0.463 | 0.189 | SCL3/4 |
| 1714 | 61060 | p0011r05c11 | R0034 A6 | 3.28 | 0.536 | 0.164 | SCL3/4 |
| 1715 | 61062 | p0011r06c21 | R0034 C11 | 2.73 | 0.526 | 0.192 | SCL3/4 |
| 1716 | 61063 | p0011r06c05 | R0034 C3 | 3.61 | 0.513 | 0.142 | SCL3/4 |
| 1717 | 61064 | p0011r06c04 | R0034 D2 | 2.58 | 0.477 | 0.185 | SCL3/4 |
| 1718 | 61065 | p0011r06c14 | R0034 D7 | 4.91 | 0.55 | 0.112 | SCL3/4 |
| 1719 | 61066 | p0011r06c18 | R0034 D9 | 2.38 | 0.285 | 0.12 | SCL3/4 |
| 1720 | 61069 | p0011r07c16 | R0034 F8 | 2.25 | 0.426 | 0.189 | SCL3/4 |
| 1721 | 61070 | p0011r08c21 | R0034 G11 | 2 | 0.234 | 0.117 | SCL3/4 |
| 1722 | 61071 | p0011r08c03 | R0034 G2 | 2.76 | 0.321 | 0.116 | SCL3/4 |
| 1723 | 61074 | p0011r08c16 | R0034 H8 | 3.02 | 0.399 | 0.132 | SCL3/4 |
| 1724 | 61075 | p0011r09c05 | R0035 A3 | 3.83 | 0.498 | 0.13 | SCL3/4 |
| 1725 | 61077 | p0011r10c21 | R0035 C11 | 2.12 | 0.306 | 0.144 | SCL3/4 |
| 1726 | 61079 | p0011r11c23 | R0035 E12 | 2.04 | 0.22 | 0.108 | SCL3/4 |
| 1727 | 61080 | p0011r11c15 | R0035 E8 | 2.76 | 0.299 | 0.108 | SCL3/4 |
| 1728 | 61081 | p0011r11c14 | R0035 F7 | 2.37 | 0.303 | 0.128 | SCL3/4 |
| 1729 | 61083 | p0011r12c15 | R0035 G8 | 2.29 | 0.351 | 0.153 | SCL3/4 |
| 1730 | 61085 | p0011r13c05 | R0036 A3 | 2.62 | 0.43 | 0.164 | SCL3/4 |
| 1731 | 61086 | p0011r13c09 | R0036 A5 | 2.53 | 0.398 | 0.157 | SCL3/4 |
| 1732 | 61088 | p0011r14c05 | R0036 C3 | 4.26 | 0.702 | 0.165 | SCL3/4 |
| 1733 | 61090 | p0011r15c07 | R0036 E4 | 3.16 | 0.429 | 0.136 | SCL3/4 |
| 1734 | 61091 | p0011r16c16 | R0036 H8 | 3.54 | 0.634 | 0.179 | SCL3/4 |
| 1735 | 61093 | p0012r02c03 | R0037 C2 | 2.2 | 0.265 | 0.121 | SCL3/4 |
| 1736 | 61094 | p0012r02c11 | R0037 C6 | 15.17 | 1.79 | 0.118 | SCL3/4 |
| 1737 | 61096 | p0012r02c08 | R0037 D4 | 2.44 | 0.27 | 0.111 | SCL3/4 |
| 1738 | 61097 | p0012r02c10 | R0037 D5 | 4.52 | 0.81 | 0.179 | SCL3/4 |
| 1739 | 61099 | p0012r03c02 | R0037 F1 | 3.34 | 0.39 | 0.117 | SCL3/4 |
| 1740 | 61100 | p0012r03c06 | R0037 F3 | 2.03 | 0.233 | 0.114 | SCL3/4 |
| 1741 | 61103 | p0012r04c17 | R0037 G9 | 2.48 | 0.413 | 0.167 | SCL3/4 |
| 1742 | 61105 | p0012r05c11 | R0038 A6 | 3.26 | 0.501 | 0.154 | SCL3/4 |
| 1743 | 61106 | p0012r05c08 | R0038 B4 | 2.46 | 0.354 | 0.144 | SCL3/4 |
| 1744 | 61110 | p0012r06c15 | R0038 C8 | 2.18 | 0.41 | 0.188 | SCL3/4 |
| 1745 | 61113 | p0012r07c09 | R0038 E5 | 2.47 | 0.376 | 0.152 | SCL3/4 |
| 1746 | 61115 | p0012r07c13 | R0038 E7 | 2.57 | 0.483 | 0.188 | SCL3/4 |
| 1747 | 61117 | p0012r07c24 | R0038 F12 | 2.18 | 0.235 | 0.108 | SCL3/4 |
| 1748 | 61118 | p0012r07c18 | R0038 F9 | 4.44 | 0.605 | 0.136 | SCL3/4 |
| 1749 | 61119 | p0012r08c03 | R0038 G2 | 2.97 | 0.35 | 0.118 | SCL3/4 |
| 1750 | 61120 | p0012r08c07 | R0038 G4 | 2.23 | 0.323 | 0.144 | SCL3/4 |
| 1751 | 61122 | p0012r08c18 | R0038 H9 | 2.23 | 0.373 | 0.168 | SCL3/4 |
| 1752 | 61125 | p0012r10c17 | R0039 C9 | 2.1 | 0.22 | 0.105 | SCL3/4 |
| 1753 | 61126 | p0012r10c16 | R0039 D8 | 2.47 | 0.345 | 0.14 | SCL3/4 |
| 1754 | 61130 | p0012r12c12 | R0039 H6 | 2.66 | 0.282 | 0.106 | SCL3/4 |
| 1755 | 61133 | p0012r13c24 | R0040 B12 | 2.25 | 0.27 | 0.12 | SCL3/4 |
| 1756 | 61134 | p0012r14c23 | R0040 C12 | 2.23 | 0.228 | 0.102 | SCL3/4 |
| 1757 | 61135 | p0012r14c03 | R0040 C2 | 2.05 | 0.298 | 0.146 | SCL3/4 |
| 1758 | 61137 | p0012r14c02 | R0040 D1 | 8.63 | 1.463 | 0.17 | SCL3/4 |
| 1759 | 61139 | p0012r14c14 | R0040 D7 | 2.69 | 0.3 | 0.111 | SCL3/4 |
| 1760 | 61143 | p0012r16c02 | R0040 H1 | 2.55 | 0.318 | 0.125 | SCL3/4 |
| 1761 | 61144 | p0012r16c18 | R0040 H9 | 2.85 | 0.318 | 0.112 | SCL3/4 |
| 1762 | 61148 | p0013r02c19 | R0041 C10 | 2.33 | 0.463 | 0.199 | SCL3/4 |
| 1763 | 61151 | p0013r02c03 | R0041 C2 | 2.25 | 0.336 | 0.149 | SCL3/4 |
| 1764 | 61155 | p0013r04c07 | R0041 G4 | 2.13 | 0.366 | 0.171 | SCL3/4 |
| 1765 | 61156 | p0013r05c05 | R0042 A3 | 2.73 | 0.38 | 0.139 | SCL3/4 |
| 1766 | 61159 | p0013r06c24 | R0042 D12 | 4.57 | 0.831 | 0.182 | SCL3/4 |
| 1767 | 61160 | p0013r07c19 | R0042 E10 | 8.6 | 1.191 | 0.138 | SCL3/4 |
| 1768 | 61163 | p0013r07c18 | R0042 F9 | 2.18 | 0.278 | 0.128 | SCL3/4 |
| 1769 | 61167 | p0013r10c12 | R0043 D6 | 3.13 | 0.39 | 0.124 | SCL3/4 |
| 1770 | 61172 | p0013r12c03 | R0043 G2 | 2 | 0.396 | 0.198 | SCL3/4 |
| 1771 | 61173 | p0013r12c07 | R0043 G4 | 3.73 | 0.72 | 0.193 | SCL3/4 |
| 1772 | 61176 | p0013r13c04 | R0044 B2 | 2.34 | 0.446 | 0.19 | SCL3/4 |
| 1773 | 61177 | p0013r14c01 | R0044 C1 | 3.9 | 0.539 | 0.138 | SCL3/4 |
| 1774 | 61183 | p0013r15c14 | R0044 F7 | 5.49 | 0.959 | 0.175 | SCL3/4 |
| 1775 | 61185 | p0013r16c24 | R0044 H12 | 2.25 | 0.409 | 0.182 | SCL3/4 |
| 1776 | 61188 | p0014r01c07 | R0045 A4 | 2.14 | 0.271 | 0.127 | SCL3/4 |
| 1777 | 61192 | p0014r02c19 | R0045 C10 | 2.33 | 0.321 | 0.138 | SCL3/4 |
| 1778 | 61198 | p0014r04c24 | R0045 H12 | 2.3 | 0.321 | 0.14 | SCL3/4 |
| 1779 | 61201 | p0014r06c22 | R0046 D11 | 2.43 | 0.269 | 0.111 | SCL3/4 |
| 1780 | 61202 | p0014r06c08 | R0046 D4 | 2.57 | 0.346 | 0.135 | SCL3/4 |
| 1781 | 61204 | p0014r07c07 | R0046 E4 | 4.27 | 0.516 | 0.121 | SCL3/4 |
| 1782 | 61206 | p0014r07c12 | R0046 F6 | 2.18 | 0.364 | 0.167 | SCL3/4 |
| 1783 | 61210 | p0015r09c02 | R0051 B1 | 2.43 | 0.463 | 0.19 | SCL3/4 |
| 1784 | 61212 | p0015r10c15 | R0051 C8 | 2.64 | 0.406 | 0.154 | SCL3/4 |
| 1785 | 61216 | p0015r11c16 | R0051 F8 | 2.28 | 0.278 | 0.122 | SCL3/4 |
| 1786 | 61225 | p0015r14c12 | R0052 D6 | 2.25 | 0.25 | 0.111 | SCL3/4 |
| 1787 | 61226 | p0015r14c14 | R0052 D7 | 2.54 | 0.3 | 0.118 | SCL3/4 |
| 1788 | 61227 | p0015r16c18 | R0052 H9 | 2.06 | 0.312 | 0.151 | SCL3/4 |

[1366] The ratio of signal 1 to signal 2 in the table above provides a measure of the level of expression of the identified sequences in tumor versus normal tissues. For example, for SEQ ID NO: 1669, the tumor-specific signal was 3.09 times that of the signal for the normal tissues tested; for SEQ ID NO: 1670, the tumor-specific signal was 2.31 times that of the signal for normal tissues, etc.

### EXAMPLE 5

### Real-Time PCR Analyses of Lung Tumor Sequences

[1367] Real-time PCR was performed on a subset of the lung tumor sequences disclosed herein in order to further evaluate their expression profiles in various tumor and normal tissues. Briefly, quantitation of PCR product relies on the few cycles where the amount of DNA amplifies logarithmically from barely above the background to the plateau. Using continuous fluorescence monitoring, the threshold cycle number where DNA amplifies logarithmically is easily determined in each PCR reaction. There are two fluorescence detecting systems. One is based upon a double-strand DNA specific binding dye SYBR Green I dye. The other uses TaqMan probe containing a Reporter dye at the 5′ end (FAM) and a Quencher dye at the 3′ end (TAMRA) (Perkin Elmer/Applied Biosystems Division, Foster City, Calif.). Target-specific PCR amplification results in cleavage and release of the Reporter dye from the Quencher-containing probe by the nuclease activity of AmpliTaq Gold™ (Perkin Elmer/Applied Biosystems Division, Foster City, Calif.). Thus, fluorescence signal generated from released reporter dye is proportional to the amount of PCR product. Both detection methods have been found to generate comparable results. To compare the relative level of gene expression in multiple tissue samples, a panel of cDNAs is constructed using RNA from tissues and/or cell lines, and real-time PCR is performed using gene specific primers to quantify the copy number in each cDNA sample. Each cDNA sample is generally performed in duplicate and each reaction repeated in duplicated plates. The final Real-time PCR result is typically reported as an average of copy number of a gene of interest normalized against internal actin number in each cDNA sample. Real-time PCR reactions may be performed on a GeneAmp 5700 Detector using SYBR Green I dye or an ABI PRISM 7700 Detector using the TaqMan probe (Perkin Elmer/Applied Biosystems Division, Foster City, Calif.).

[1368] Results obtained from real-time PCR analysis of a number of lung tumor-specific sequences disclosed herein are summarized in the table below. In addition, extended cDNA sequences for many of these clones were obtained by searching public sequence databases. The extended sequences, and the proteins encoded by those sequences, are identified by SEQ ID NO: in Table 12 below.

TABLE 12

| | | | | | Extended | Encoded |
|---|---|---|---|---|---|---|
| | Clone | Clone | SEQ ID | | cDNA | Polypeptide |
| Library | Name | No | NO: | Real-Time PCR Results | Sequence | Sequence |
| SQL1 | L972P | 47988 | 1789 | Overexpressed in 1/7 lung squamous | | |
| | | | | tumor, 1/3 HN squamous tumor. Low or | | |
| | | | | no expression in normal tissues. | | |
| SQL1 | L979P | 48005 | 1790 | Over-expressed in 2/7 squamous lung | 1791 | 1806 |
| | | | | tumors, 1/3 HN squamous tumors, 1/2 | | |
| | | | | adeno lung tumors. Low or no | | |
| | | | | expression in normal tissues. | | |
| SQL1 | L970P | 49853 | 1269 | Highly overexpressed in 1/7 lung | | |
| | | | | squamous tumors and 1/3 HN | | |
| | | | | squamous tumor. Low or no expression | | |
| | | | | in normal tissues. | | |
| SQL1 | L981P | 49865 | 1272 | Over-expressed in 1/6 squamous lung | | |
| | | | | and 1/3 HN squamous tumors. Low or | | |
| | | | | no expression in normal tissues. | | |
| SQL1 | L980P | 49826 | 1279 | Over-expressed in 3/7 squamous lung | 1792 | 1807 |
| | | | | tumors, 1/3 HN squamous tumors, 1/2 | | |
| | | | | adeno lung tumors. Low or no | | |
| | | | | expression in normal tissues. | | |
| SCL1 | L973P | 20631 | 117 | Over-expressed in atypical carcinoid | 1793 | 1808 |
| | | | | METs and adenocarcinoma. Expression | | |
| | | | | in several normal tissues. | | |
| SCL1 | L974P | 20661 | 128 | Over-expressed in primary small cell, | 1794 | 1809 |
| | | | | squamous and adenocarcinomas. | | |
| | | | | Expression observed in several normal | | |
| | | | | tissues. | | |
| SCL1 | L996P | 50430 | 1442 | Over-expressed in 2/2 Primary Small | 1795 | 1810 |
| | | | | Cell, 6/6 Small Cell Cell Lines, 1/1 | | |
| | | | | Atypical Carc. METs, 1/1 Adeno, 1/1 | | |
| | | | | Squamous. Very low or no expression in | | |
| | | | | normal tissues. | | |
| SCL3 | L977P | 26961 | 288 | Over-expressed in 1/2 Primary Small | 1796 | 1811 |
| | | | | Cell 1/6 Small Cell-Cell Line, and 1/1 | | |
| | | | | Carcinoid Mets. Very low or no | | |
| | | | | expression in normal tissues. | | |
| SCL2 | L978P | 24928 | 1339 | Over-expressed in 2/2 primary small | | |
| | | | | cell, 3/6 small cell-cell lines, 1/1 | 1797 | 1812 |
| | | | | carcinoid mets.,adeno and squamous | | |
| | | | | tumor pools; Low or no expression in | | |
| | | | | normal tissues | | |
| SCL3/4 | L984P | 50507 | 1446 | Highly expressed in 1/2 primary small | 1798 | 1813 |
| | | | | cell tumors and 4/6 small cell tumor cell | | |
| | | | | lines. Low or no expression in normal | | |
| | | | | issues. | | |
| SCL3/4 | L580S | 50536 | 1449 | Over-expressed in select small cell and | | |
| | | | | squamous tumors. Some expression | | |
| | | | | observed normal brain, bronchiol, soft | | |
| | | | | palate and trachea. | | |
| SCL3/4 | L988P | 50645 | 1531 | Over-expressed in 1/2 Primary Small | 1799 | 1814 |
| | | | | Cell, 1/2 Primary Small Cell, 6/6 Small | | |
| | | | | Cell-Cell Lines, 1/1 Carcinoid Mets., | | |
| | | | | Adeno & Squamous Tumor pool. | | |
| | | | | Expressed in some normal tissues | | |
| | | | | (brain, adrenal gland, salivary gland, | | |
| | | | | trachea, thymus). | | |
| SCL3/4 | L1423P | 50625 | 1533 | Over-expressed in 1/2 primary small | 1800 | 1815 |
| | | | | cell, 5/6 small cell-cell lines, 1/1 | | |
| | | | | carcinoid mets. Also expressed in | | |
| | | | | normal brain and pituitary gland. | | |
| SCL3/4 | L986P | 50483 | 1490 | Over-expressed in 1/2 primary small | | |
| | | | | cell, 5/6 small cell-cell lines, 1/1 | | |
| | | | | carcinoid mets., adeno and squamous | | |
| | | | | tumor pool. Expressed in normal brain, | | |
| | | | | pituitary gland and spinal cord. | | |
| SCL3/4 | L987P | 50560 | 1527 | Over-expression in 1/2 Primary Small | 1801 | 1816-1818 |
| | | | | Cell, 6/6 Small Cell-Cell Lines, 1/1 | | |
| | | | | Carcinoid Mets. Expression in normal | | |
| | | | | pituitary and adrenal glands. | | |
| SCL3/4 | L1424P | 50639 | 1547 | Over-expression in 1/2 Primary Small | | |
| | | | | Cell and 1/1 Carcinoid Mets. Low or no | | |
| | | | | expression in normal tissues. | | |
| MLN1 | L997P | 26749 | 730 | Over-expression in 1/1 atypical | | |
| | | | | carcinoid METs No expression in | | |
| | | | | normal tissues. | | |
| MLN1 | L999P | 26752 | 733 | Over-expressed in 2/2 Primary Small | | |
| | | | | Cell, 6/6 Small Cell Cell Lines, 1/1 | | |
| | | | | Atypical Carc. METs Expression in | | |
| | | | | several normal tissues. | | |
| MLN1 | L1400P | 26529 | 405 | Over-expressed in 2/6 Small Cell Cell | | |
| | | | | Lines and 2/2 Primary Small Cell. | | |
| | | | | Moderate to low expression in several | | |
| | | | | normal tissues | | |
| MLN1 | L998P | 27699 | 468 | Over-expression in 1/1 Atypical | 1802 | 1819 |
| | | | | Carcinoid METs. Low expression in | | |
| | | | | normal tissues. | | |
| LAP1 | L1425P | 59303 | 949 | Over-expressed in 4/7 squamous | 1803 | 1820 |
| | | | | tumors, 1/2 adenocarcinoma tumors | | |
| | | | | and in a pool of six small cell lung | | |
| | | | | carcinomas. Moderate to high | | |
| | | | | expression observed in normal brain, | | |
| | | | | kidney and skeletal muscle. | | |
| LAP1 | L1426P | 59314 | 1156 | Highly overexpressed in one lung | 1804 | 1821 |
| | | | | squamous tumor and one HN | | |
| | | | | squamous tumor. Very low or no | | |
| | | | | expression observed in normal tissues. | | |
| LAP1 | L1427P | 59298 | 921 | Highly over-expressed in 3/12 | 1805 | 1822 |
| | | | | adenocarcinoma tumors. Very low or no | | |
| | | | | expression in normal tissues | | |
| LAP1 | L1428P | 59316 | 1180 | Over-expressed in 4/12 | | |
| | | | | adenocarcinoma tumors and lower level | | |
| | | | | expression in several other | | |
| | | | | adenocarcinoma tumors. Very low or no | | |
| | | | | expression in normal tissues. | | |

### EXAMPLE 6

### Identification of CD4 Immunogenic T Cell Epitopes Derived from Lung Tumor Antigens

[1369] CD4 T cell lines specific for the antigen L548S (SEQ ID NO: 789) were generated as follows.

[1370] A series of overlapping 20-mer peptides were synthesized that spanned the entire L548S sequence (SEQ ID NO: 1834-1856, respectively). For priming, peptides were combined into pools of 4-5 peptides and cultured at 2 micrograms/ml with dendritic cells and purified CD4+ T cells in 96 well U-bottomed plates. One hundred cultures were generated for each peptide pool. Cultures were restimulated weekly with fresh dendritic cells loaded with peptide pools. Following a total of 3 stimulation cycles, cells were rested for an additional week and tested for specificity to antigen presenting cells (APC) pulsed with peptide pools using interferon-gamma ELISA and proliferation assays. For these assays, adherent monocytes loaded with either the relevant peptide pool, recombinant L548S or an irrelevant peptide were used as antigen presenting cells (APC). As shown in Table 13, below, a number of CD4 T cell lines demonstrated reactivity with the priming peptides as well as recombinant L548S protein. These lines were further expanded to be tested for recognition of individual peptides from the pools, as well as for recognition of recombinant L548S.

[1371] The dominant reactivity of these lines appeared to be with peptide 21 (SEQ ID NO: 1854), which corresponds to amino acids 161-180 of L548S.

TABLE 13

| Stimulation | | Proliferation (CPM) | | | Stimulation Index | |
|---|---|---|---|---|---|---|
| | Positive | | | | | |
| Peptides | cell lines | No antigen | Peptides | L548S | Peptides | L548S |
| p1-5 | B1 | 700 | 14891 | 8791 | 21 | 13 |
| | B2 | 1135 | 48724 | 53944 | 42 | 47 |
| | G2 | 1227 | 7609 | 3193 | 6 | 3 |
| p6-10 | | | | | | |
| p11-15 | E2 | 8315 | 33723 | 13391 | 4 | 2 |
| | E4 | 22097 | 100040 | 44171 | 5 | 2 |
| p16-19 | | | | | | |
| p20-23 | E3 | 3937 | 45367 | 15524 | 11 | 4 |
| | F4 | 2648 | 130947 | 12927 | 49 | 5 |

### EXAMPLE 7

### Detection of Antibodies Against Lung Tumor Antigens in Patient Sera

[1372] Antibodies specific for the lung tumor antigens L548S (SEQ ID NO: 789), and L552S (SEQ ID NO: 809) were shown to be present in effusion fluid or sera of lung cancer patients but not in normal donors. More specifically, the presence of antibodies against L548S, L551S (SEQ ID NO: 827) and L552S in effusion fluid obtained from lung cancer patients and in sera from normal donors was examined by ELISA using recombinant proteins and HRP-conjugated anti-human Ig. Briefly, each protein (100 ng) was coated in a 96-well plate at pH 9.5. In parallel, BSA (bovine serum albumin) was also coated as a control protein. The signals ([S], absorbance measured at 405 nm) against BSA ([N]) were determined. The results of these studies are shown in Table 14, wherein—represents [S]/[N]<2; +/− represents [S]/[N]>2; ++ represents [S]/[N]>3; and +++ represents [S]/[N]>5.

TABLE 14
Detection of Antibodies against Lung Tumor Antigens

| | L548S | L551S | L552S |
|---|---|---|---|
| Effusion fluid | | | |
| #1 | +/− | − | − |
| #2 | − | − | − |
| #3 | − | − | +++ |
| #4 | − | − | − |
| #5 | +/− | − | − |
| #7 | − | − | − |
| #8 | − | − | +/− |
| #10 | − | − | +/− |
| #11 | − | − | − |
| #12 | = | − | +/− |
| #13 | − | − | − |
| #14 | +/− | − | +/− |
| #15 | − | − | − |
| #17 | − | − | ++ |
| #18 | − | − | − |
| #19 | − | − | ++ |
| #20 | − | − | − |
| Normal sera | | | |
| #21 | − | − | − |
| #22 | − | − | − |
| #23 | − | − | − |
| #24 | − | − | − |
| #25 | − | − | − |

[1373] Using Western blot analyses, antibodies against L552S were found to present in 1 out of 4 samples of effusion fluid from lung cancer patients, with no L552S antibodies being detected in the three samples of normal sera tested.

### EXAMPLE 8

### Fusion Proteins of Lung Tumor Antigens

[1374] Fusion proteins of full-length Ra12 with either L801P ORF4 (SEQ ID NO: 1670) or L801P ORF5 (SEQ ID NO: 1671) were prepared and expressed as single recombinant proteins in E. coli as follows.

[1375] The cDNA for ORF4 of L801P was obtained by PCR with a cDNA for the full length L801P and the primers of SEQ ID NO: 1857 and 1858. The cDNA for ORF5 of L801P was obtained by PCR with a cDNA for the full length L801P and the primers of SEQ ID NO: 1859 and 1860. The PCR products with expected size were recovered from agarose gel, digested with restriction enzymes EcoRI and XhoI, and cloned into the corresponding sites in the expression vector pCRX I for subsequent expression in E. coli. For the fusion of Ra12 with ORF4, the best expression was obtained in HMS174(DE3)pLysS in 2×YS media, with recombinant protein being induced using IPTG at 37° C. for approximately 3 hours. For the fusion of Ra12 with ORF5, the best expression was obtained in HMS174(DE3)pLysS in 2×YS media, again with recombinant protein being induced using IPTG at 37° C. for approximately 3 hours. The plasmids used for the fusion protein production were confirmed by DNA sequencing. The determined cDNA sequences for the ORF4 and ORF5 fusions are provided in SEQ ID NO: 1861 and 1862, respectively, with the corresponding amino acid sequences being provided in SEQ ID NO: 1863 and 1864, respectively.

### EXAMPLE 9

### Cloning of cDNA Encoding Full-Length L984P

[1376] The example illustrates the isolation of cDNA sequences encoding L984P by PCR amplication from four separate cDNA sources. Briefly, an earlier isolated cDNA sequence of clone L984P was identified as having homology to a DNA sequence that encodes human achaete-scute homolog 1 (ASH1). Gene specific primers were made using the sequence information present in the public domain for ASH1 (genbank acc. NM-004316). Using these gene specific primers in PCR amplification, L984P was cloned from four separate cDNA sources. The four cDNA sources were a small cell lung carcinoma primary tumor sample (RNA Id. 573A), a METs neuroendocrine atypical carcinoid sample (RNA Id. 512A), and two small cell lung carcinoma cell lines (cell-line Id. NCI H128 and DMS79). The determined cDNA sequences for these four clones are provided in SEQ ID NO: 1865-1868, respectively. The coding region of the cDNA contains a repeat of the triplet CAG that exhibits polymorphism in the human genomic DNA. This polymorphism can be observed in L984P cloned from the four different sources as well as from the cDNA of ASH1 and that derived from the human chromosome 4. The cDNA of ASH1 (genbank Acc. NM-006688) deposited in the genbank database contains 14 copies of the triple CAG, whereas the cDNA sequence derived from the human chromosome 4 sequence (genbank Ace. XM_{—}006688) contains 12 copies of the triplet. The cDNA cloned from 573A and 512A both contain 12 copies of the CAG triplet. The cDNA cloned from the small cell lung carcinoma cell line DMS79 contains 13 copies of the triplet CAG, while the cDNA cloned from the small cell lung carcinoma cell line NCI H128 contains only 10 copies of the triplet CAG. As the polymorphism is present in the coding region, this results in polymorphisms in the protein sequences as well (see, SEQ ID NO: 1869-1872).

### EXAMPLE 10

### Cloning of cDNA Encoding Full-Length L985P

[1377] As previously disclosed in Example IC, a search of the public databases using the sequence for contig 139 (SEQ ID NO: 1467, also known as L985P) as the query was conducted and showed that this sequence had homology to the cDNA (SEQ ID NO: 1676) encoding the cell surface immunomodulator-2 (CSIMM-2, sequence obtained from the Geneseq database). The full-length sequence of the clone was obtained by screening a small cell lung carcinoma cDNA library with a radioactively labeled probe of the original cloned sequence (SEQ ID NO: 1467). Approximately 500,000 clones from the cDNA library were screened and 2 independent clones containing cDNA insert of 1.35 kb were isolated. The full-length cDNA sequence is provided in SEQ ID NO: 1873 and the encoded amino acid sequence is provided in SEQ ID NO: 1874. Surprisingly, an alignment of the isolated full-length cDNA sequence of L985P (SEQ ID NO: 1873) with the Geneseq database sequence for CSIMM-2 showed that L985P differs from the GeneSeq database sequence by one nucleotide. This nucleotide difference results in a change of one amino acid residue at position 119 (G to E) of SEQ ID NO: 1874.

[1378] The predicted protein structure and sequence of L985P indicates that it is a member of the recently described MS4A (membrane-spanning 4-domain, subfamily A) gene family (Liang and Tedder, 2001 Genomics 72:119-127). The MS4A gene family currently consists of at least 21 distinct human and mouse proteins of which nine members are from humans. These include CD20, FcεRIβ, HTm4, MS4A4A, MS4A5, MS4A6A, MS4A7, MS4A8B (same as L985P) and MS4A12. The MS4A family members are cell surface expressed proteins containing four transmembrane spanning domains, with N- and C-terminal regions facing the cytoplasmic side of the cells. The human MS4A family members exhibit 20-40% overall homology at the protein level, which is confined mostly to the transmembrane domains. The transmembrane domains of L985P share the highest homology to CD20 with approximately 40% identity and 60% similarity between the two protein sequences in this region. The MS4A family members demonstrate a broad tissue distribution with expression observed in diverse cell types in hematopoetic and nonhematopoetic tissues. However, expression of some MS4A family members is highly restricted to a particular cell type, such as CD20, which is only expressed on B-cells. As also mentioned in Example 1C, L985P (MS4A8B) is over-expressed in small cell lung carcinoma (SCLC) as determined by quantitative real-time PCR. Low level expression is seen in some normal tissues including lung, pituitary gland, stomach, colon, and trachea, while expression in other normal tissues checked was negligible or undetectable (see, Example 1C).

[1379] The physiological function for most of the MS4A family members remains to be elucidated. Previous studies have shown that CD20 is functionally important for the regulation of cell growth and differentiation, and signal transduction in B-cells. There is also evidence that CD20 may serve as a calcium channel by forming a homo- or heterotetrameric complex. FcεRIβ is part of a tetrameric receptor complex, which mediates interaction with IgE-bound antigens that lead to cellular responses such as the degranulation of mast cells. Because of the sequence and structural homologies between the MS4A family members, it is highly likely that they will share overlapping functional properties.

[1380] Some of the MS4A family members have been found to be associated with cancer. CD20 is expressed in more than 90% of B-cell non-Hodgkin lymphomas, which has made it an ideal target for immunotherapeutic approaches for the treatment of B-cell malignancies. Anti-CD20 monoclonal antibodies have been used with high success in the treatment of non-Hodgkin-lymphomas in both naive and radiolabeled forms. The anti-CD20 MAbs have been shown to exert their antitumor effects through several pathways, which include complement-mediated cytolysis, antibody-mediated cellular cytotoxicity and antibody-mediated cell cycle arrest and apoptosis. Analysis of the human EST databases indicates that other members of the MS4A gene family including MS4A4A, A6A, A7 and A8B are also expressed in various cancers including lung, breast, pancreas, colon, ovary, kidney and brain. By comparison to CD20, one or more of the MS4A family genes would be used as targets for immunotherapeutic approaches for the treatment of hematopoetic and nonhematopoetic malignancies.

[1381] The MS4A protein family members are structurally similar to other membrane protein families with four transmembrane domains. These include the Tetraspanin protein family (TM4SF) and the GABA-A receptor protein family. Tetraspanins are associated with cancer and may play a direct role in controlling tumor progression. Although CD9 expression will positively influence B cell migration, CD9 overexpression suppresses motility and metastasis in carcinoma cells and there is an inverse correlation with metastasis in melanoma. However, CD9 is also expressed on 90% of non-T cell acute lymphoblastic leukemia cells and 50% of chronic lymphocytic leukemias. A recent study using RT-PCR analysis of tetraspanin expression in Burkitt lymphoma cell lines found that 90% of the lines express CD53, CD81, CD63, CD82 and SAS at high levels. CD151 /PETA3 is an effector of metastasis and cell migration and MAbs that block this activity have been developed. Similarly, overexpression of the tetraspanin CO-029/D6.1 will increase the metastatic potential of cell lines. The tetraspanins control a diverse set of biological functions that can be regulated by MAbs. The functions of the tetraspanins, in general, can be grouped into actions that affect cell activation and proliferation, as well as adhesion and motility. These functions tend to be carried out by their association with integrins. The functional activity of tetraspanins can be modulated with MAbs in such a way as to control cell proliferation. For example, CD81/TAPA-1 is associated with B cell activation and increased proliferation, an activity that can be blocked with MAbs. MAbs with anti-proliferative activity have been generated to the tetraspanin family member CO-029/D6.1.

[1382] As mentioned above, L985P is specifically over-expressed in small cell lung carcinomas. This fact and a comparison to CD20, tetraspanins and Her2 whose over-expression in cancers makes them effective cancer therapeutic targets, indicate that L985P may be a good target for immunotherapeutic approaches for the treatment of small cell lung carcinomas.

[1383] To facilitate the generation, purification, and evaluation of MAb against L985P, MAbs against the entire deduced amino acid sequence of the L985P protein, peptides derived from L985P or chemically produced (synthetic) L985P peptides will be used. Also, one can use MAbs raised against chimeric forms of L985P protein molecule fused to Ra12 protein, either the long form (Ra12—which is the first 128 amino acids of Ra12) and/or the short form (Ra12S), or fused to a polyhistidine peptide or any combination of these molecules. Provided are the predicted cDNA and amino acid sequences for the his-tagged L985P-Ra12 fusion molecules: Ra12-L985P_cDNA (SEQ ID NO: 1875), Ra12-L985P_Protein (SEQ ID NO: 1876), Ra12S-L985P_cDNA (SEQ ID NO: 1877) and Ra12S-L985P_Protein (SEQ ID NO: 1878); and the L985P derived peptides: his-tagged Ra12S-L985PEx_cDNA (SEQ ID NO: 1879), his-tagged Ra12S-L985PEx_Protein (SEQ ID NO: 1880), L985P_Extracellular_Loop-2_cDNA (SEQ ID NO: 1881) and L985P_Extracellular_Loop-2_Peptide (SEQ ID NO: 1882).

### EXAMPLE 11

### Expression in E. coli of a His-Tagged RA12-L985P Fusion Protein

[1384] This example sets forth a specific embodiment of a fusion between Ra12 and L985P and its expression in E. coli. A his-tagged fusion protein of the long-form of Ra12 and all but the first three amino acid residues of L985P was expressed as a single recombinant protein in E. coli. The long-form of Ra12 was modified from the original sequence of amino acid residues 192-323 of MTA32A in that a putative thrombin cleavage site was replaced with a HindIII restriction site. The L985P was fused downstream of the Ra12 sequence in a pCRXI vector. The Ra12 sequence was cloned downstream of the RBS. As a result, a his-tagged fusion protein is produced when the recombinant vector is expressed in E. coli. The sequence for the fusion of the long-form of Ra12 and L985P was confirmed by DNA sequencing. The determined cDNA sequence is provided in SEQ ID NO: 1875 as this sequence is the same as that predicted in Example 10.

### EXAMPLE 12

### Cloning of cDNA Encoding Full-Length L1428P

[1385] As previously disclosed in Example 5, real-time PCR was performed on a subset of the lung tumor sequences disclosed herein in order to further evaluate their expression profiles in various tumor and normal tissues. The results are provided above in Table 12. One of the sequences analyzed was from clone #59316 (SEQ ID NO: 1 180, L1428P) and was shown to be expressed in a subset of lung adenocarcinomas.

[1386] Further studies have isolated the full-length cDNA for the cloned sequence of #59316 (SEQ ID NO: 1180, L1428P). In order to determine the transcript size of the gene, a multiple tissue Northern blot was probed with the radioactively labeled original cloned sequence (SEQ ID NO: 1180). The Northern blot included about 20 ug of total RNA from lung adenocarcinoma and normal tissues samples. Visual analysis of the exposed film revealed a single transcript of approximately 6.5-7.0 kb. The full-length sequence of the clone was obtained by screening a lung adenocarcinoma primary tumor cDNA library with a radioactively labeled probe of the original cloned sequence (SEQ ID NO: 1180). Approximately 500,000 clones from the cDNA library were screened and 5 independent clones containing a cDNA insert of 6.8 kb were isolated. This insert size is similar to the size estimated by Northern-blot analysis. The full-length sequence is provided in SEQ ID NO: 1883. Although no distinct ORF could be identified, seven potential ORFs can be predicted and the amino acid sequences of these potential ORFs, designated L1428P_ORF1 to ORF7, are provided in SEQ ID NO: 1884-1890, respectively. The expression of full-length L1428P was re-analyzed by real-time PCR as set forth in Example 5 on extended cDNA panels for both lung adenocarcinomas and squamous cell carcinomas. The lung adenocarcinoma extended panel real-time results again confirm the expression of L1428P in adenocarcinoma with about 40-50% of the adenocarcinoma samples showing varying levels of expression. The real-time results from the squamous cell carcinoma extended panel shows that L1428P is also expressed in lung squamous cell carcinoma. However, the expression was in fewer lung squamous cell carcinoma samples and at a lower level.

### EXAMPLE 13

### Real-Time PCR Analysis of cDNA Sequences Which are Over-Expressed in Lung Tumors as Shown by Microarray

[1387] The following clones listed in Table 15 were shown previously to be over-expressed in lung tumors by microarray analysis (see, Example 2C and Example 6, Table 11). The results of this microarray analysis are summarized below in Table 15.

TABLE 15

| SEQ ID NO: | CLONE ID # | Ratio | Mean Signal 1 | Mean Signal 2 |
|---|---|---|---|---|
| 1383 | 50096 | 16.04 | 1.895 | 0.118 |
| | (contig 156) | | | |
| 1560 | 54454 | 2.86 | 0.2 | 0.07 |
| | (contig 234) | | | |
| 1561 | 54463 | 3.31 | 0.248 | 0.075 |
| | (contig 235) | | | |
| 1707 | 59376 | 3.23 | 0.734 | 0.227 |
| 1733 | 61090 | 2.68 | 0.364 | 0.136 |
| 1735 | 61093 | 5.7 | 0.687 | 0.121 |
| 1758 | 61137 | 8.63 | 1.463 | 0.17 |
| 1761 | 61144 | 7.02 | 0.783 | 0.112 |
| 1766 | 61159 | 4.57 | 0.831 | 0.182 |
| 1771 | 61173 | 5.57 | 1.075 | 0.193 |
| 1775 | 61185 | 5.29 | 0.962 | 0.182 |
| 1786 | 61225 | 3.41 | 0.379 | 0.111 |

[1388] Real-time PCR anaylsis was performed on these sequences on a small cell lung carcinoma panel as described in Example 7. The results obtained from the real-time PCR analysis are summarized in Table 16.

TABLE 16

| SEQ ID | |
|---|---|
| NO: | Real-Time PCR Results |
| 1383 | On the SCLC panel, this gene is overexpressed in 2/2 primary |
| | small cell carcinoma and 6/6 SCLC cell lines. Some expression |
| | is also seen in normal brain, pituitary gland, spinal cord, |
| | and thymus. |
| 1560 | On the SCLC panel, this gene is overexpressed |
| | in 2/2 primary small cell carcinomas and 3/6 SCLC cell lines. |
| | Expression is also seen in normal brain and pituitary gland. |
| 1561 | On the SCLC panel, this gene is overexpressed in 2/2 primary |
| | small cell carcinomas, 6/6 SCLC cell lines, 1/1 atypical |
| | carcinoid metastases, adenocarcinoma, and squamous cell |
| | carcinoma pools. Expression is also seen in normal bone |
| | marrow, lymph node, thymus, and at lower levels in other |
| | normal tissues. |
| 1707 | On the SCLC panel, this gene is overexpressed in 1/6 SCLC |
| | cell lines and 0/2 primary small cell carcinomas. It is also |
| | expressed in normal stomach and at lower levels in normal brain, |
| | salivary gland, and trachea. |
| 1733 | On the SCLC panel, this gene is overexpressed in 2/2 primary |
| | small cell carcinomas, 6/6 SCLC cell lines, 1/1 atypical |
| | carcinoid metastases, adenocarcinoma, and squamous cell |
| | carcinoma pools. Some expression is also seen in normal |
| | bone marrow, lymph node, thyms, and at lower levels in |
| | other normal tissues. |
| 1735 | On the SCLC panel, this gene is overexpressed in 2/2 primary |
| | small cell carcinomas, 5/6 SCLC cell lines, 0/1 atypical |
| | carcinoid metastases, and adenocarcinoma pool. Lower |
| | level expression is also seen in normal bone marrow and |
| | skeletal muscle. |
| 1758 | On the SCLC panel, this gene is overexpressed in 2/2 primary |
| | small cell carcinomas, 6/6 SCLC cell lines, 0/1 atypical |
| | carcinoid metastases, adenocarcinoma, and squamous cell |
| | carcinoma pools. Some expression is also seen in normal |
| | bone marrow, thyroid gland, and trachea. |
| 1761 | On the SCLC panel, this gene is overexpressed in 2/2 primary |
| | small cell carcinomas, 6/6 SCLC cell lines, 0/1 atypical |
| | carcinoid metastases, adenocarcinoma, and squamous cell |
| | carcinoma pools. Expression is also seen in normal bone |
| | marrow. |
| 1766 | On the SCLC panel, this gene is overexpressed in 2/2 primary |
| | small cell carcinomas, 6/6 SCLC cell lines, and 0/1 atypical |
| | carcinoid metastases. Expression is also seen in normal |
| | pituitary gland, adrenal gland, bone marrow, thymus, |
| | salivary gland, and at lower levels in a variety of other |
| | normal tissues. |
| 1771 | On the SCLC panel, this gene is overexpressed in 2/2 primary |
| | small cell carcinomas, 6/6 SCLC cell lines, 0/1 atypical |
| | carcinoid metastases, and squamous cell carcinoma pools. |
| | Some expression is also seen in normal pituitary gland. |
| 1775 | On the SCLC panel, this gene is overexpressed in 2/2 primary |
| | small cell carcinomas, adenocarcinoma, and squamous cell |
| | carcinoma pools. No expression is observed in the SCLC |
| | cell lines and the atypical carcinoid metastases. Some |
| | normal tissue expression is seen in liver, stomach, thyroid |
| | gland, lymph node, and thymus. |
| 1776 | On the SCLC panel, this gene is overexpressed in 2/2 primary |
| | small cell carcinomas, 6/6 SCLC cell lines, adenocarcinoma, and |
| | squamous cell carcinoma pools. Some expression is also seen in |
| | normal bone marrow, pituitary gland, stomach, trachea, and |
| | thymus. |

[1389] These sequences were then compared to known sequences in the available databases (Genbank, GeneSeq, huEST, etc.). Nine of these sequences showed some degree of similarity to known sequences in the available databases. The results of these nine hits are summarized in Table 17 along with providing sequence listing identifiers for the DNA sequences and the respective encoded amino acid sequences (where available) of these matches. SEQ ID NO: 1561 and 1786 showed no significant similiarity to any known sequences.

TABLE 17

| | | | | Amino |
|---|---|---|---|---|
| SEQ | | | cDNA | Acid Seq. |
| ID | | | Seq. of | Of Hit (If |
| NO: | GenBank Database Hit | GeneSeq. Hit | Hit | Known) |
| 1383 | Pr22 Protein/Stathmin/ | A16376, A08801, A01633 | 1891 | 1901 |
| | Oncoprotein 18 | | | |
| 1560 | CDNA DKFZp564O163 | — | 1892 | — |
| 1561 | Novel | Human secreted protein 5′ | — | — |
| | | EST. (C30107) | | |
| 1707 | SOX21 (AF 107044) | Human secreted protein gene | 1893 | 1902 |
| | | 7 cloone HE8CV18. | | |
| | | (X27317) | | |
| 1733 | KIAA0166 gene | Human gene signature | 1894 | 1903 |
| | (D79988) | HUMGS08725. (T26483) | | |
| 1735 | Ubiquitin-conjugating | DNA encoding human | 1895 | 1904 |
| | enzyme E2 (AF 160215) | ubiquitin-like conjugating | | |
| | | protein (UBCLE). (X81676) | | |
| 1758 | Pituitary tumor | Z97293, X89295, V36964, | 1896 | 1905 |
| | transforming gene | V63198, Z97292, C00858, | | |
| | protein 1 (AF095287) | V88346, Z80287 | | |
| 1761 | Novel | Kidney injury associated | 1897 | 1906 |
| | | molecule HW051 cDNA | | |
| | | clone. (V80605) | | |
| 1766 | Cyclin-dependent kinase | Cyclin-dependent kinase | 1898 | 1907 |
| | inhibitor p18 (CDKN2C) | (CDK6) inhibiting protein. | | |
| | (AF041248) | (T10925; T31456) | | |
| 1771 | CDK4-inhibitor (p16- | Multiple Matches | 1899 | 1908 |
| | 1NK4) (L27211) | | | |
| 1775 | Monokine induced by | Monokine induced by | 1900 | 1909 |
| | gamma interferon (MIG) | gammer-interferon. (X14998; | | |
| | (NM_002416) | Z26088) | | |
| 1776 | Novel | — | — | |

[1390] Further studies have resulted in isolation of the full-length cDNA sequence for the cloned sequence of clone #61093 (SEQ ID NO: 1735, L1437P). In order to determine the transcript size of the gene, a multiple tissue Northern blot was probed with the radioactively labeled original cloned sequence (SEQ ID NO: 1735). The Northern blot included about 20 ug of total RNA from small cell lung carcinoma and normal tissues samples. Visual analysis of the exposed film revealed a single transcript of approximately 1.2 kb. The full-length sequence was obtained by screening a small cell lung carcinoma tumor cDNA library with the radioactively labeled probe of the original cloned sequence (SEQ ID NO: 1735). Approximately 120,000 clones from the cDNA library were screened and 2 independent clones containing a cDNA insert of 931 bases were isolated. The inserts are similar in size to that estimated by Northern Blot analysis. The full-length cDNA sequence is provided in SEQ ID NO: 1910. It was discovered that there was one nucleotide difference between the full-length cDNA and a previously published sequence. However, this nucleotide change does not result in a change in the deduced amino acid sequence. The deduced amino acid sequence encoded by the full-length cDNA is the same as already provided in SEQ ID NO: 1904, and confirms earlier predictions that this cDNA encodes a known protein, ubiquitin-conjugated enzyme E2 (AF160215, SEQ ID NO: 1904). SEQ ID NO: 1910 (L1437P) was shown to be over-expressed in lung small cell lung carcinoma by microarray, real-time PCR and Northern Blot analysis.

### EXAMPLE 14

### Expression in E. coli of a L548S His Tag Fusion Protein

[1391] PCR was performed on the L548S coding region with the following primers:

[1392] Forward primer PDM-433 5′ gctaaaggtgaccccaagaaaccaaag 3′ (SEQ ID NO: 1911) Tm 60° C.

[1393] Reverse primer PDM-438 5′ ctattaactcgagggagacagataaacagtttcttta 3′ (SEQ ID NO: 1912) TM 61° C.

[1394] The PCR conditions were as follows:

[1395] 10 μl 10× Pfu buffer

[1396] 1.0 μl 10 mM dNTPs

[1397] 2.0 μl 10 μM each primer

[1398] 83 μl sterile water

[1399] 1.5 μl Pfu DNA polymerase (Stratagene, La Jolla, Calif.)

[1400] 50 ηg DNA

[1401] 96° C. for 2 minutes, 96° C. for 20 seconds, 61° C. for 15 seconds, 72° C. for 1 minute 30 seconds with 40 cycles and then 72° C. for 4 minutes.

[1402] The PCR product was digested with XhoI restriction enzyme, gel purified and then cloned into pPDM His, a modified pET28 vector with a His tag in frame, which had been digested with Eco72I and XhoI restriction enzymes. The correct construct was confirmed by DNA sequence analysis and then transformed into BL21 CodonPlus (Stratagene, La Jolla, Calif.) and BIL21 pLys S (Novagen, Madison, Wis.) cells for expression.

[1403] The amino acid sequence of expressed recombinant L548S is shown in SEQ ID NO: 1913, and the DNA coding region sequence is shown in SEQ ID NO: 1914.

### EXAMPLE 15

### Expression in E. coli of a L551S His Tag Fusion Protein

[1404] PCR was performed on the L551S coding region with the following primers:

[1405] Forward primer PDM-498 5′ gtgacgatggaggagctgcgggagatgg 3′ (SEQ ID NO: 1915) Tm 67° C.

[1406] Reverse primer PDM-499 5′ cgcctaactcgagtcactaacagctgggag 3′ (SEQ ID NO: 1916) TM 66° C.

[1407] The PCR conditions were as follows:

[1408] 10 μl 10× Pfu buffer

[1409] 1.0 μl 10 mM dNTPs

[1410] 2.0 μl 10 μM each primer

[1411] 83 μl sterile water

[1412] 1.5 μl Pfu DNA polymerase (Stratagene, La Jolla, Calif.)

[1413] 50 ηg DNA

[1414] 96° C. for 2 minutes, 96° C. for 20 seconds, 66° C. for 15 seconds, 72° C for 2 minutes 20 seconds with 40 cycles and then 72° C. for 4 minutes.

[1415] The PCR product was digested with XhoI restriction enzyme, gel purified and then cloned into pPDM His, a modified pET28 vector with a His tag in frame, which had been digested with Eco721 and XhoI restriction enzymes. The correct construct was confirmed by DNA sequence analysis and then transformed into BLR (DE3) pLys S and BLR (DE3) CodonPlus RP cells for expression.

[1416] The amino acid sequence of expressed recombinant L551S is shown in SEQ ID NO: 1917, and the DNA coding region sequence is shown in SEQ ID NO: 1918.

### EXAMPLE 16

### Expression in E. coli of a L552S His Tag Fusion Protein

[1417] PCR was performed on the L552S coding region with the following primers:

[1418] Forward primer PDM-479 5′ cggtgccacgcccatggaccttc 3′ (SEQ ID NO: 1919) Tm 64° C.

[1419] Reverse primer PDM-480 5′ ctgagaattcattaaacttgtggttgctcttcacc 3′ (SEQ ID NO: 1920) TM 62° C.

[1420] The PCR conditions were as follows:

[1421] 10 μl 10× Pfu buffer

[1422] 1.0 μl 10 mM dNTPs

[1423] 2.0 μl 10 μM each primer

[1424] 83 μt sterile water

[1425] 1.5 μl Pfu DNA polymerase (Stratagene, La Jolla, Calif.)

[1426] 50 ηg DNA

[1427] 96° C. for 2 minutes, 96° C. for 20 seconds, 63° C. for 15 seconds, 72° C. for 1 minute with 40 cycles and then 72° C. for 4 minutes.

[1428] The PCR product was digested with EcoRI restriction enzyme, gel purified and then cloned into pPDM His, a modified pET28 vector with a His tag in frame, which had been digested with Eco721 and EcoR1 restriction enzymes. The correct construct was confirmed by DNA sequence analysis and then transformed into BL21 CodonPlus (Stratagene, La Jolla, Calif.) cells for expression.

[1429] The amino acid sequence of expressed recombinant L552S is shown in SEQ ID NO: 1921, and the DNA coding region sequence is shown in SEQ ID NO: 1922.

### EXAMPLE 17

### Cloning of cDNA Encoding Full-Length Clones #19069 and Clone #18965 or #9002

[1430] Partial sequences of two lung antigens, clones #19069 (SEQ ID NO: 90) and #18965 or #19002 (both SEQ ID NO: 15), were previously provided. These partial sequences were used as a query to predict the full-length cDNA sequences for the isolated cloned sequenced by searching the publicly available databases. The predicted full-length cDNA sequence for the isolated cloned sequence of SEQ ID NO: 90 is provided in SEQ ID NO: 1923. The predicted full-length cDNA sequence for the isolated cloned sequence of SEQ ID NO: 15 is provided in SEQ ID NO: 1924. The deduced amino acid sequences of the two antigens are provided in SEQ ID NO: 1925 and 1926, respectively These sequences were then compared to known sequences in the GeneSeq database. Both sequences showed some degree of similarity to known sequences in the GeneSeq database. SEQ ID NO: 1923 shows similarity to a lipophosphatic acid acyltransferase (GeneSeq Z25000 and Z65038) and SEQ ID NO: 1924 shows similarity to a zinc/iron regulated transporter-like protein (Geneseq Z38333 and A14995).

### EXAMPLE 18

### Epitope-Mapping of L552S-Specific Antibodies

[1431] Peptides of candidate antigens can be used for the evaluation of antibody responses in both preclinical and clinical studies. These data allow one to further confirm the antibody response against a certain candidate antigen. Protein-based ELISA with and without competitive peptides and peptide-based ELISA can be used to evaluate these antibody responses. Peptide ELISA is especially useful since it can further exclude the false positive of the antibody titer observed in protein-based ELISA as well as to provide the simplest assay system to test antibody responses to candidate antigens. In this example, data was obtained using L552S-peptides that show that individual cancer patients produce L552S-specific antibodies recognizing primarily the following three epitopes of L552S:

(SEQ ID NO:1927)

| | | |
|---|---|---|
| (1) | aa21-35: | GPRSGGAQAKLGCCW |

(SED ID NO:1928)

| | | |
|---|---|---|
| (2) | aa116-135: | KVICKSCISQTPGINLDLGS |

(SED ID NO:1929)

| | | |
|---|---|---|
| (3) | aa141-160: | IIPKEEHCKMPEAGEEQPQV |

[1432] In further studies, it was found that affinity-purified antibodies generated by SEQ ID NO: 1929 can recognize the L552S protein, and occupy about 0.6% of the total immunoglobulin kappa of a patient's lung plural effusion (LPE) fluid. It was also found that SEQ ID NO: 1929 is the dominant epitope of the rabbit polyclonal antibodies specific for L552S protein.

### EXAMPLE 19

### L985P Expression

[1433] For recombinant expression in mammalian cells, the full length L985P cDNA was subcloned into the mammalian expression vector pCEP4 (Invitrogen) with and without a FLAG epitope tag. Both constructs were transfected into HEK293 cells (ATCC) using Lipofectamine 2000 reagent (Invitrogen). Western blot analysis was then performed on these transfected cells to determine if recombinant L985P was being transiently expressed.

[1434] Briefly the transfection was carried out as follows. HEK cells were plated at a density of 350,000 cells/well (6 well plate) in DMEM (Gibco) containing 10% FBS (Hyclone) and grown overnight. The following day, 2 μl of Lipofectamine 2000 (Invitrogen) was added to 50 μl of Optimem 1 (Invitrogen) containing no FBS and incubated for 5 minutes at room temperature. In a different set of tubes 50 μl of Optimem 1 was mixed with 0.8 μg of L985P (with and without FLAG)/plasmid DNA and the mixture was transferred to the Lipofectamine 2000/Optimem mix. The combined mixture was incubated for 20 minutes at room temperature and transferred to the HEK293 cells containing 0.5 ml of DMEM 10% FBS. The Lipofectamine 2000/DNA mix was then added to the HEK293 cells and incubated for 16-24 hrs at 37° C. with 7% CO₂. Cells were rinsed with PBS then collected and pelleted by centrifugation.

[1435] For Western blot analysis, whole cell Iysates were generated by incubating the cells in Triton-X100 containing lysis buffer for 30 minutes on ice. Lysates were then cleared by centrifugation at 15,000 rpm for 5 minutes at 4° C. Samples were diluted with SDS-PAGE loading buffer containing beta-mercaptoethanol, then boiled for 10 minutes prior to loading on the SDS-PAGE gel. The protein was transferred to nitrocellulose and probed using a purified anti-L985P rabbit polyclonal sera at a dilution of 1:1000. The blot was revealed with a donkey anti-rabbit Ig coupled to HRP (Jackson ImmunoResearch) followed by incubation in ECL substrate. Results of the blot indicate that recombinant L985P (with and without the FLAG) was expressed in the HEK293 cells.

### EXAMPLE 20

### Generation of Polyclonal Antibodies to Lung Tumor Antigens

[1436] Three lung antigens, L548S (SEQ ID NO: 789), L552S (SEQ ID NO: 809) and L985P peptide #3482 (SEQ ID NO: 1930), were expressed and purified for use in antibody generation.

[1437] L548S and L552S were expressed in an E. coli recombinant expression system and grown overnight in LB Broth with the appropriate antibiotics at 37° C. in a shaking incubator. The next morning, 10 ml of the overnight culture was added to 500 ml of 2×YT with the appropriate antibiotics in a 2 L-baffled Erlenmeyer flask. When the optical density of the culture reached 0.4-0.6 at 560 nanometers, the cells were induced with IPTG (1 mM). Four hours after induction with IPTG, the cells were harvested by centrifugation.

[1438] The cells were then washed with phosphate buffered saline and centrifuged again. The supernatant was discarded and the cells were either frozen for future use or immediately processed. Twenty milliliters of lysis buffer was added to the cell pellets and vortexed. To break open the E. coli cells, this mixture was then run through a french press at a pressure of 16,000 psi. The cells were then centrifuged again and the supernatant and pellet were checked by SDS-PAGE for the partitioning of the recombinant protein.

[1439] For proteins that localized to the cell pellet, the pellet was resuspended in 10 mM Tris pH 8.0, 1% CHAPS and the inclusion body pellet was washed and centrifuged again. This procedure was repeated twice more. The washed inclusion body pellet was solubilized with either 8M urea or 6M guanidine HCI containing 10 mM Tris pH 8.0 plus 10 mM imidazole. The solubilized protein was added to 5 ml of nickel-chelate resin (Qiagen) and incubated for 45 minutes to 1 hour at room temperature with continuous agitation.

[1440] After incubation, the resin and protein mixture was poured through a disposable column and the flow through was collected. The column was then washed with 10-20 column volumes of the solubilization buffer. The antigen was then eluted from the column using 8M urea, 10 mM Tris pH 8.0 and 300 mM imidazole and collected in 3 ml fractions. A SDS-PAGE gel was run to determine which fractions to pool for further purification.

[1441] As a final purification step, a strong anion exchange resin, in this case Hi-Prep Q (Biorad), was equilibrated with the appropriate buffer and the pooled fractions from above were loaded onto the column. Each antigen was eluted off the column with an increasing salt gradient. Fractions were collected as the column was run and another SDS-PAGE gel was run to determine which fractions from the column to pool.

[1442] The pooled fractions were dialyzed against 10 mM Tris pH 8.0. The release criteria were purity as determined by SDS-PAGE or HPLC, concentration as determined by Lowry assay or Amino Acid Analysis, identity as determined by amino terminal protein sequence, and endotoxin level was determined by the Limulus (LAL) assay. The proteins were then put in vials after filtration through a 0.22-micron filter and the antigens were frozen until needed for immunization.

[1443] The L985P peptide #3482 was synthesized and conjugated to KLH and frozen until needed for immunization.

[1444] The polyclonal antisera were generated using 400 micrograms of each lung antigen combined with 100 micrograms of muramyldipeptide (MDP). An equal volume of Incomplete Freund's Adjuvant (IFA) was added and then mixed and injected subcutaneously (S.C.) into a rabbit. After four weeks, the rabbit was S.C. boosted with 200 micrograms of antigen mixed with an equal volume of IFA. Thereafter the rabbit was I.V. boosted with 100 micrograms of antigen. The animal was bled seven days following each boost. The blood was then incubated at 4° C. for 12-24 hours followed by centrifugation to generate the sera.

[1445] The polyclonal antisera were characterized using 96 well plates coated with antigen and incubating with 50 microliters (typically 1 microgram/microliter) of the polyclonal antisera at 4° C. for 20 hours.

[1446] 250 microliters of BSA blocking buffer was added to the wells and incubated at room temperature for 2 hours. Plates were washed 6 times with PBS/0.1% Tween. The rabbit sera were diluted in PBS/0.1% Tween/0.1%BSA. 50 microliters of diluted sera was added to each well and incubated at room temperature for 30 minutes. The plates were washed as described above, and then 50 microliters of goat anti-rabbit horseradish peroxidase (HRP) at a 1:10000 dilution was added and incubated at room temperature for 30 minutes.

[1447] The plates were washed as described above, and 100 microliters of TMB Microwell Peroxidase Substrate was added to each well. Following a 15-minute incubation in the dark at room temperature, the calorimetric reaction was stopped with 100 microliters of IN H₂SO₄ and read immediately at 450 nm. All the polyclonal antibodies showed immunoreactivity to the appropriate antigen.

[1448] Tables 18-20 show the antibody reactivity of rabbit antisera in serial dilution to the three lung antigens, L548S, L552S and L985P peptide #3482. The first column shows the antibody dilutions. The columns “Pre-immune sera” indicate ELISA data for two experiments using pre-immune sera. These results are averaged in the fourth column. The columns “anti-L548S, L552S or #3482” indicate ELISA data for two experiments using sera from rabbits immunized as described above, using the respective antigen, referred to as either L548S, L552S or #3482 in the tables.

TABLE 18

| | Pre- | Pre- | | Anti- | Anti- | |
|---|---|---|---|---|---|---|
| Antibody | immune | immune | | L548S | L548S | |
| dilution | sera (1) | sera (2) | Average | (1) | (2) | Average |
| 1:1000 | 0.17 | 0.10 | 0.14 | 0.51 | 0.51 | 0.51 |
| 1:2000 | 0.12 | 0.09 | 0.11 | 0.30 | 0.30 | 0.30 |
| 1:4000 | 0.09 | 0.08 | 0.08 | 0.17 | 0.20 | 0.19 |
| 1:8000 | 0.09 | 0.07 | 0.08 | 0.12 | 0.13 | 0.12 |
| 1:16000 | 0.09 | 0.08 | 0.08 | 0.09 | 0.12 | 0.11 |
| 1:32000 | 0.09 | 0.08 | 0.09 | 0.08 | 0.09 | 0.09 |
| 1:64000 | 0.11 | 0.09 | 0.10 | 0.11 | 0.12 | 0.12 |
| 1:128000 | 0.10 | 0.08 | 0.09 | 0.08 | 0.09 | 0.08 |
| 1:256000 | 0.09 | 0.08 | 0.08 | 0.11 | 0.09 | 0.10 |
| 1:512000 | 0.11 | 0.09 | 0.10 | 0.08 | 0.08 | 0.08 |
| 1:1024000 | 0.10 | 0.08 | 0.09 | 0.08 | 0.10 | 0.09 |
| 1:2048000 | 0.10 | 0.09 | 0.09 | 0.08 | 0.09 | 0.09 |

[1449] TABLE 19

| | Pre- | Pre- | | Anti- | Anti- | |
|---|---|---|---|---|---|---|
| Antibody | immune | immune | | L552S | L552S | |
| dilution | sera (1) | sera (2) | Average | (1) | (2) | Average |
| 1:1000 | 0.08 | 0.19 | 0.13 | 2.14 | 2.03 | 2.08 |
| 1:2000 | 0.08 | 0.06 | 0.07 | 1.93 | 1.97 | 1.95 |
| 1:4000 | 0.07 | 0.06 | 0.06 | 1.81 | 1.82 | 1.82 |
| 1:8000 | 0.08 | 0.06 | 0.07 | 1.63 | 1.64 | 1.64 |
| 1:16000 | 0.06 | 0.05 | 0.05 | 1.47 | 1.29 | 1.38 |
| 1:32000 | 0.06 | 0.05 | 0.06 | 1.03 | 1.10 | 1.06 |
| 1:64000 | 0.06 | 0.06 | 0.06 | 0.73 | 0.69 | 0.71 |
| 1:128000 | 0.06 | 0.05 | 0.06 | 0.44 | 0.48 | 0.46 |
| 1:256000 | 0.06 | 0.06 | 0.06 | 0.26 | 0.25 | 0.26 |
| 1:512000 | 0.07 | 0.06 | 0.06 | 0.16 | 0.15 | 0.16 |
| 1:1024000 | 0.06 | 0.07 | 0.06 | 0.12 | 0.10 | 0.11 |
| 0.00 | 0.06 | 0.06 | 0.06 | 0.06 | 0.06 | 0.06 |

[1450] TABLE 20

| | Pre- | Pre- | | Anti- | Anti- | |
|---|---|---|---|---|---|---|
| Antibody | immune | immune | | #3482 | #3482 | |
| dilution | sera (1) | sera (2) | Average | (1) | (2) | Average |
| 1:1000 | 0.10 | 0.07 | 0.09 | 2.10 | 2.07 | 2.08 |
| 1:2000 | 0.07 | 0.07 | 0.07 | 1.80 | 1.84 | 1.82 |
| 1:4000 | 0.07 | 0.06 | 0.06 | 1.78 | 1.80 | 1.79 |
| 1:8000 | 0.06 | 0.06 | 0.06 | 1.94 | 1.72 | 1.83 |
| 1:16000 | 0.06 | 0.06 | 0.06 | 1.75 | 1.74 | 1.74 |
| 1:32000 | 0.06 | 0.06 | 0.06 | 1.42 | 1.47 | 1.44 |
| 1:64000 | 0.06 | 0.06 | 0.06 | 1.12 | 1.17 | 1.14 |
| 1:128000 | 0.06 | 0.06 | 0.06 | 0.79 | 0.87 | 0.83 |
| 1:256000 | 0.06 | 0.06 | 0.06 | 0.70 | 0.65 | 0.68 |
| 1:512000 | 0.06 | 0.06 | 0.06 | 0.41 | 0.41 | 0.41 |
| 1:1024000 | 0.06 | 0.06 | 0.06 | 0.25 | 0.25 | 0.25 |
| 0 | 0.06 | 0.06 | 0.06 | 0.06 | 0.06 | 0.06 |

[1451] Table 21 shows the Protein A purification of the antibodies to the lung antigen, L548S.

TABLE 21

| Purified | | | |
|---|---|---|---|
| Antibody | | | |
| Concentration | Pro A | Pro A | |
| (μg/ml) | pure | pure | Average |
| 3.0 | 2.20 | 2.12 | 2.16 |
| 1.5 | 2.09 | 2.01 | 2.05 |
| 0.75 | 1.95 | 1.93 | 1.94 |
| 0.38 | 1.83 | 1.85 | 1.84 |
| 0.188 | 1.68 | 1.68 | 1.68 |
| 0.094 | 1.36 | 1.38 | 1.37 |
| 0.047 | 1.02 | 1.06 | 1.04 |
| 0.0234 | 0.68 | 0.73 | 0.71 |
| 0.0177 | 0.40 | 0.42 | 0.41 |
| 0.0059 | 0.24 | 0.25 | 0.24 |
| 0.0029 | 0.17 | 0.15 | 0.16 |
| 0.00 | 0.06 | 0.06 | 0.06 |

[1452] Table 22 shows the affinity purification of the antibodies to the lung antigen, L552S.

TABLE 22

| Anti- | Affinity | Affinity | | Anti- | Affinity | Affinity | |
|---|---|---|---|---|---|---|---|
| body | pure | pure | | body | pure | pure | |
| dilu- | (salt | (salt | Aver- | dilu- | (acid | (acid | Aver- |
| tion | peak) | peak) | age | tion | peak) | peak) | age |
| 1:50 | 0.19 | 0.18 | 0.18 | 1:1000 | 2.22 | 2.20 | 2.21 |
| 1:100 | 0.10 | 0.09 | 0.10 | 1:2000 | 2.17 | 2.10 | 2.13 |
| 1:200 | 0.06 | 0.06 | 0.06 | 1:4000 | 2.05 | 2.06 | 2.06 |
| 1:400 | 0.06 | 0.06 | 0.06 | 1:8000 | 1.95 | 1.94 | 1.95 |
| 1:800 | 0.06 | 0.05 | 0.06 | 1:16000 | 1.86 | 1.82 | 1.84 |
| 1:1600 | 0.06 | 0.06 | 0.06 | 1:32000 | 1.64 | 1.57 | 1.61 |
| 1:3200 | 0.06 | 0.06 | 0.06 | 1:64000 | 1.28 | 1.26 | 127 |
| 1:6400 | 0.06 | 0.06 | 0.06 | 1:128000 | 0.88 | 0.87 | 0.88 |
| 1:12800 | 0.06 | 0.06 | 0.06 | 1:256000 | 0.56 | 0.56 | 0.56 |
| 1:25600 | 0.06 | 0.06 | 0.06 | 1:512000 | 0.35 | 0.34 | 0.34 |
| 1:51200 | 0.06 | 0.06 | 0.06 | 1:1024000 | 0.18 | 0.17 | 0.18 |
| 0.00 | 0.06 | 0.06 | 0.06 | 0.00 | 0.06 | 0.06 | 0.06 |

[1453] Tables 23A and 23B show the affinity purification and the Protein A purification of the antibodies to the lung antigen L985P peptide #3482.

TABLE 23A

| Purified | | | |
|---|---|---|---|
| Antibody | | | |
| Concentration | Affinity | Affinity | |
| (μg/ml) | pure | pure | Average |
| 3.0 | 1.73 | 1.69 | 1.71 |
| 1.50 | 1.32 | 1.28 | 1.30 |
| 0.75 | 0.96 | 0.91 | 0.93 |
| 0.38 | 0.63 | 0.61 | 0.62 |
| 0.19 | 0.38 | 0.39 | 0.38 |
| 0.09 | 0.19 | 0.20 | 0.19 |
| 0.05 | 0.16 | 0.10 | 0.13 |
| 0.02 | 0.12 | 0.15 | 0.13 |

[1454] TABLE 23B

| Purified | | | |
|---|---|---|---|
| Antibody | | | |
| Concentration | Pro A | Pro A | |
| (μg/ml) | pure | pure | Average |
| 40.70 | 1.80 | 1.91 | 1.85 |
| 20.35 | 1.54 | 1.53 | 1.53 |
| 10.18 | 1.04 | 1.18 | 1.11 |
| 5.09 | 0.71 | 0.78 | 0.74 |
| 2.54 | 0.43 | 0.52 | 0.48 |
| 1.27 | 0.25 | 0.28 | 0.26 |
| 0.64 | 0.13 | 0.20 | 0.17 |
| 0.32 | 0.10 | | 0.10 |

### EXAMPLE 21

### Cloning of Extended cDNA Sequence of L1439P

[1455] The partial cDNA sequence for clone #61144 (SEQ ID NO: 1761, referred to as clone L1439P) was identified from a small cell lung carcinoma PCR based subtraction library on lung chip 5. As previously disclosed in Example 4, microarray analysis was performed on this subset of the lung tumor sequences in order to further evaluate their expression profiles in various tumor and normal tissues, the results of which are provided in Table 11. Clone L1439P was shown to have a greater than 2-fold over-expression in the tumor probe group versus normal tissues and an average expression in normal tissues of less than 0.2. Additional studies showed this same clone to be over-expressed in a subset of small cell lung carcinomas (see, Table 16).

[1456] Further studies have resulted in the isolation of the full-length cDNA for the cloned sequence of L1439P. In order to determine the transcript size of the gene, a multiple tissue Northern blot was probed with the radioactively labeled original cloned sequence (SEQ ID NO: 1180). The Northern blot included about 10 ug of total RNA from small cell lung carcinoma and normal tissues samples. Visual analysis of the exposed film revealed a single transcript of approximately 2.4 kb. The extended sequence of the clone was obtained by screening a small cell lung carcinoma tumor cDNA library with a radioactively labeled probe of the original cloned sequence (SEQ ID NO: 1761). Approximately 120,000 clones from the cDNA library were screened and one independent clone containing a cDNA insert of 1.5 kb was isolated. This extended cDNA sequence is provided in SEQ ID NO: 1931, and the deduced amino acid sequence encoded by this extended cDNA sequence is provided in SEQ ID NO: 1932. This extended cDNA sequence was analyzed against the Genbank database and was found to show similarity to the NUF2R gene (AF326731). The full-length cDNA sequence of NUF2R is provided in SEQ ID NO: 1933, and the deduced amino acid sequence encoded by NUF2R is provided in SEQ ID NO: 1934.

### EXAMPLE 22

### Expression in Megaterium of a Histidine Tag-Free L552S Fusion Protein

[1457] PCR was performed on the L552S coding region with the following primers:

[1458] Forward primer PDM-737 5′ ctatgttggcatgcggtgccacgccc 3′ (SEQ ID NO: 1935) Tm 66° C.

[1459] Reverse primer PDM-738 5′ cacgcctaagatcttcattaaacttgtggttg 3′ (SEQ ID NO: 1936) TM 60° C.

[1460] The PCR conditions were as follows:

[1461] 10 μl 10×Pfu buffer

[1462] 1.0 μl 10 mM dNTPs

[1463] 2.0 μl 10 μM each primer

[1464] 83 μl sterile water

[1465] 1.5 μl Pfu DNA polymerase (Stratagene, La Jolla, Calif.)

[1466] 50 ηg DNA

[1467] 96° C. for 2 minutes, 96° C. for 20 seconds, 63° C. for 15 seconds, 72° C. for 1 minute with 40 cycles and then 72° C. for 4 minutes.

[1468] The PCR product was digested with SphI and BglII restriction enzymes, gel purified and then cloned into pMEG-3, which had been digested with SphI and BglII restriction enzymes. The correct construct was confirmed by DNA sequence analysis and then transformed into Megaterium cells for expression.

[1469] The amino acid sequence of expressed recombinant L552S is shown in SEQ ID NO: 1937, and the DNA coding region sequence is shown in SEQ ID NO: 1938.

### EXAMPLE 23

### Expression in E. Coli of a Histidine Tag-Free L552S Fusion Protein

[1470] PCR was performed on the L552S coding region with the following primers:

[1471] Forward primer PDM-736 5′ ctatgttgcatatatgcggtgccacgcc 3′ (SEQ ID NO: 1939) Tm 64° C.

[1472] Reverse primer PDM-480 5′ ctgagaattcattaaacttgtggttgctcttcacc 3′ (SEQ ID NO: 1920) TM 62° C.

[1473] The PCR conditions were as follows:

[1474] 10 μl 10×Pfu buffer

[1475] 1.0 μl 10 mM dNTPs

[1476] 2.0 μl 10 μM each primer

[1477] 83 μl sterile water

[1478] 1.5 μl Pfu DNA polymerase (Stratagene, La Jolla, Calif.)

[1479] 50 ηg DNA

[1480] 96° C. for 2 minutes, 96° C. for 20 seconds, 63° C. for 15 seconds, 72° C. for 1 minute with 40 cycles and then 72° C. for 4 minutes.

[1481] The PCR product was digested with NdeI and EcoRI restriction enzymes, gel purified and then cloned into pPDM, a modified pET28 vector, which had been digested with NdeI and EcoRI restriction enzymes. The correct construct was confirmed by DNA sequence analysis and then transformed into BLR pLys S and HMS 174 pLysS cells for expression.

[1482] The amino acid sequence of expressed recombinant L552S is shown in SEQ ID NO: 1940, and the DNA coding region sequence is shown in SEQ ID NO: 1941.

### EXAMPLE 24

### Generation of L552S-Specific CTL Lines using in vitro Whole-Gene Priming

[1483] Using in vitro whole-gene priming with tumor antigen-vaccinia infected DC (Yee et al, The Journal of Immunology, 157(9):4079-86, 1996), human CTL lines were derived that specifically recognize autologous fibroblasts transduced with the L552S tumor antigen, as determined by interferon-gamma ELISPOT analysis. Specifically, dendritic cells (DC) were differentiated from Percoll-purified monocytes derived from PBMC of normal human donors by growing for five days in RPMI medium containing 10% human serum, 50 ng/ml human GM-CSF and 30 ng/ml human IL-4. Following culture, DC were infected overnight with a recombinant adenovirus that expresses L552S at a multiplicity of infection (M.O.I) of five, and matured overnight by the addition of 2 μg/ml CD40 ligand. Virus was then inactivated by UV irradiation. CD8+ cells were enriched for by the depletion of CD4+ and CD14+ cells. CD8+ T cells were isolated using a magnetic bead system, and priming cultures were initiated in individual wells of six 96-well plates with the cytokines IL-6 and IL-12. Cultures were restimulated every 7-10 days using autologous primary fibroblasts retrovirally transduced with L552S, and the costimulatory molecule CD80 in the presence of IL-2. Following three stimulation cycles, two CD8+ T cell lines, 2-12G and 4-7A, were identified using interferon-gamma ELISPOT analysis that specifically produce interferon-gamma when stimulated with the L552S tumor antigen-transduced autologous fibroblasts, but not with a control antigen. Both lines were restimulated and tested again in an antibody blocking assay to determine restriction to specific HLAs. Line 2-12G appears to be HLA-B/C restricted, while Line 4-7A appears to be HLA-A restricted. Line 2-12G was cloned using anti-CD3 and feeder cells, with fourteen specific clones being recovered. These clones have the same pattern of reactivity in antibody blocking assays as the parental L2-12G CTL line. In addition, using a panel of HLA-mismatched B-LCL lines transduced with a vector expressing L552S, and measuring interferon-gamma production by the CTL lines in an ELISPOT assay, these CTLs appear to be restricted by HLA-B*4402.

### EXAMPLE 25

### Epitope-Mapping of L552S- and XAGE-1-Specific Antibodies

[1484] It was previously found that L552S is an alternative splicing isoform of XAGE-1. In this example, data was obtained using 20 mer peptides specific for either L552S or XAGE-l to screen the sera of lung cancer patients for antibodies specific for L552S and XAGE-1, respectively. It was found that individual cancer patients produce both antibodies specific for L552S as well as for XAGE-1. It was determined that these specific antibodies recognize primarily the following additional epitope of L552S and two epitopes of XAGE-1:

| | |
|---|---|
| L552S-specific: | |
| aa31-50: LGCCWGYPSPRSTWNDRPF | (SEQ ID NO:1942) |
| XAGE-1-specific: | |
| aa11-30: CSLGVFPSAPSPVWGTRRSC | (SED ID NO:1943) |
| aa41-50: ILSPLLRHGGHTQTQNHTAS | (SED ID NO:1944). |

### EXAMPLE 26

### Immunohistochemistry Analysis of L552S

[1485] In order to determine L552S protein expression in various normal and lung cancer tissues, immunohistochemistry (IHC) analysis was performed using an affinity purified L552S polyclonal antibody. Specifically, tissue samples were fixed in a formalin solution for 12-24 hrs and embedded in paraffin before being sliced into 8 micron sections. Steam heat induced epitope retrieval (SHIER) in 0.1 M sodium citrate buffer (pH 6.0) was used for optimal staining conditions. Sections were incubated with 10% serum/PBS for 5 minutes. Primary antibody was added to each section for 25 minutes at indicated concentrations followed by a 25 minute incubation with either anti-rabbit or anti-mouse biotinylated antibody. Endogenous peroxidase activity was blocked by three-1.5 minute incubations with hydrogen peroxidase. The avidin biotin complex/horse radish peroxidase (ABC/HRP) system was used along with DAB chromogen to visualize L552S expression. Slides were counterstained with hematoxylin to visualize cell nuclei.

[1486] IHC analysis of L552S is disclosed in Table 24:

TABLE 24

| | Staining | |
|---|---|---|
| Tissue Type | (pos/total) | Comments |
| Adeno Lung Cancer | 10/12 | Strong staining (nuclear “dot-like”) |
| Squamous Lung | 4/12 | Light staining |
| Cancer | | (cytoplasmic “dot-like”) |
| Adrenal | 0/1 | |
| Artery-endothelium | 0/1 | Light cytoplasmic staining |
| Blood (bone marrow) | 0/1 | |
| Brain (cerebellum) | 0/1 | |
| Brain (cortex) | 0/1 | |
| Breast | 0/1 | |
| Bronchus | 0/5 | |
| Colon | 1/4 | Very light staining |
| | | (cytoplasmic “dot-like”) |
| Esophagus | 0/1 | |
| Fallopian Tube | 0/1 | |
| Gall Bladder | 0/1 | |
| Heart | 0/1 | |
| Kidney | 2/4 | Very light staining |
| | | (cytoplasmic “dot-like”) |
| Liver | 1/4 | Very light staining |
| | | (cytoplasmic “dot-like”) |
| Lung | 0/13 | |
| Pancreas | 0/1 | |
| Pituitary | 1/1 | Very light staining |
| | | (cytoplasmic “dot-like”) |
| Placenta | 1/1 | Very light staining |
| | | (cytoplasmic “dot-like”) |
| Prostate | 0/1 | |
| Skeletal Muscle | 0/1 | |
| Skin | 0/1 | |
| Small Bowel | 0/1 | |
| Spinal Cord | 0/1 | |
| Spleen | 0/1 | |
| Stomach | 0/1 | |
| Testis | 1/2 | Very few selected cells positive |
| Thymus | 0/1 | |
| Thyroid | 0/1 | |
| Trachea | 0/1 | |
| Urinary Bladder | 0/1 | |
| Ureter | 0/1 | |
| Uterus | 0/1 | |

### EXAMPLE 27

### Identification of CD4 Immunogenic T Cell Epitopes Derived from L552S

[1487] CD4 T cell lines specific for the antigen L552S (SEQ ID NO: 809) were generated as follows. A total of thirty 20-mer peptides overlapping by 15 amino acids corresponding to the amino acid residues of full-length L552S (SEQ ID NO: 809) were synthesized. The amino acid sequence of each of the thirty 20-mer peptides and the respective DNA sequence which encodes each of these peptides is provided in Table 25. Dendritic cells (DC) were differentiated from Percoll-purified monocytes derived from PBMC of normal male human donors by plastic adherence and growing for five days in RPMI medium containing 10% human serum, 50 ng/ml human GM-CSF and 30 ng/ml human IL-4. Purified CD4 T cells were generated from the same donor as the DCs by using MACs beads and negative selection of PBMCs. The DCs were pulsed overnight with pools of the 20-mer peptides with each peptide at an individual concentration of 0.5 μg/mL. The pulsed DCs were washed and plated at 10,000 cells per well of 96-well round bottom plates, and purified CD4 T cells were added at 100,000 cells per well. Cultures were supplemented with 10 ng/mL IL-6 and 5 ng/mL IL-12 and incubated at 37° C.

[1488] Cultures were restimulated as above on a weekly basis using DCs made and pulsed as above as the APC, supplemented with 10 U/mL IL-2 and 5 ng/mL IL-7. Following three in vitro stimulation cycles (the initial priming+two restimulations), lines (each line corresponds to one well) were tested for specific proliferation and cytokine production in response to the stimulating pool versus an irrelevant peptide pool of peptides derived from assorted unrelated antigens. A number of individual CD4 T cell lines (49/576 by IFN-gamma and 63/576 by proliferation) demonstrated significant cytokine release (IFN-gamma) and proliferation in response to the L552S peptide pools, but not to the control peptide pool. Twenty five of the T cell lines which exhibited specific activity were restimulated on the appropriate pool of L552S peptides and reassayed on autologous DCs pulsed with the individual peptides or recombinant protein made in E. coli. Approximately 13 immunogenic peptides were recognized by the T cells from the entire set of peptide antigens tested. These 13 peptides are (*) in Table 25.

[1489] In some cases the peptide reactivity of the T cell line could be mapped to a single peptide but some could be mapped to more than one peptide in each pool. This result indecates that all 13 peptides may be naturally processed epitopes of the L552S protein.

TABLE 25
L552S CD4 Overlapping Peptides

| | | Peptide | DNA |
|---|---|---|---|
| Peptide | Sequence | SEQ ID NO: | SEQ ID NO: |
| 1 | MRCHAHGPSCLVTAITREEG | 1945 | 1974 |
| 2 | HGPSCLVTAITREEGGPRSG | 1946 | 1975 |
| 3 | LVTAITREEGGPRSGGAQAK | 1947 | 1976 |
| 4* | TREEGGPRSGGAQAKLGCCW | 1948 | 1977 |
| 5* | GPRSGGAQAKLGCCWGYPSP | 1949 | 1978 |
| 6* | GAQAKLGCCWGYPSPRSTWN | 1950 | 1979 |
| 7* | LGCCWGYPSPRSTWNPDRRF | 1951 | 1980 |
| 8 | GYPSPRSTWNPDRRFWTPQT | 1952 | 1981 |
| 9 | RSTWNPDRRFWTPQTGPGEG | 1953 | 1982 |
| 10 | PDRRFWTPQTGPGEGRHERH | 1954 | 1983 |
| 11 | WTPQTGPGEGRHERHTQTQN | 1955 | 1984 |
| 12 | GPGEGRHERHTQTQNHTASP | 1956 | 1985 |
| 13 | RHERHTQTQNHTASPRSPVM | 1957 | 1986 |
| 14 | TQTQNHTASPRSPVMESPKK | 1958 | 1987 |
| 15* | HTASPRSPVMESPKKKNQQL | 1959 | 1988 |
| 16 | RSPVMESPKKKNQQLKVGIL | 1960 | 1989 |
| 17 | ESPKKKNQQLKVGILHLGSR | 1961 | 1990 |
| 18* | KNQQLKVGILHLGSRQKKIR | 1962 | 1991 |
| 19* | KVGILHLGSRQKKIRIQLRS | 1963 | 1992 |
| 20* | HLGSRQKKIRIQLRSQCATW | 1964 | 1993 |
| 21* | RQKKIRIQLRSQCATWKVICK | 1965 | 1994 |
| 22* | IQLRSQCATWKVICKSCISQ | 1966 | 1995 |
| 23* | SQCATWKVICKSCISQTPGIN | 1967 | 1996 |
| 24* | KVICKSCISQTPGINLDLGS | 1968 | 1997 |
| 25 | SCISQTPGINLDLGSGVKVK | 1969 | 1998 |
| 26 | TPGINLDLGSGVKVKIIPKE | 1970 | 1999 |
| 27* | LDLGSGVKKIIPKEEHCKM | 1971 | 2000 |
| 28 | GVKVKIIPKEEHCKMPEAGE | 1972 | 2001 |
| 29 | IIPKEEHCKMPEAGEEQPQV | 1973 | 2002 |

### EXAMPLE 28

### HLA Restriction of L552S

[1490] To determine the HLA restriction, a panel of fibroblasts matched at one or two HLA alleles were transduced with pBIB L552 or infected with adenovirus L552 at an MOI of 50:1. These targets were tested against a D77 L552 CD8 clone in an ELISPOT assay with 10000 fibroblasts, 10000 T cells and 5 U/mL IL-2 per well. The results indicate that the restriction is with either B*4402 or Cw*0501.

[1491] To decide between the two, COS-7 cells were transfected with a combination of pcDNA3 L552S and pcDNA3 B*4402 or pBIB Cw*0501. These targets were again tested against the same D77 L552 CD8 clone as above in an ELISPOT assay with 10000 COS-7, 10000 clone 14 and 5 U/mL IL-2 per well. The clone recognized the L552 and B*4402 transfected COS-7 cells.

[1492] In further studies, three different tumors, 659-22, 3-90T and HTB 183, that had been previously analyzed by real time RT-PCR for L552 message level were selected and transduced with B*4402 or Cw*0501 as a control. 659-22 and 3-90T contain L552 message, while HTB 183 was the negative control. After two rounds of selection, the tumors were analyzed by FACs for their B44 expression level. 659-22 were found to endogenously express high levels of B44, but it was not determined which of the B44s, B*4402, B*4404, etc, were being expressed. Approximately 20% of the 3-90T express B44. The HTB 183 express B44 quite well. When the above clone was tested against these tumors, 659-22 transducted with B*4402 was recognized. Thus, the results indicate that L552 is restriction by HLA-B*4402.

### EXAMPLE 29

### Expression of L552S and XAGE-1

[1493] In this Example, real-time RT-PCR analysis was performed in order to delineate the expression of L552S from XAGE-1 in lung cancers. The real-time RT-PCR analysis was performed using specific primers localized in the 5′ unique region of L552S, the 5′ unique region of XAGE-I and the 3′ common region. Specific messages for L552S and XAGE-1 were detected in two lung tumor samples but not in the normal lung samples.

[1494] Identical expression profiles were observed between 5′ unique region of L552S and the common 3′ sequences. The message level for XAGE-1 detected in lung tumors using the 5′ unique primers of XAGE-1 was much lower compared with L552S. However, the extreme secondary structure posed by XAGE-1 could hamper the cDNA synthesis of the 5′ sequence unique to XAGE-1. Thus, it appears from the Northern analysis that XAGE-1 may be a more abundant isoform.

### EXAMPLE 30

### EST Expression Profile of L552S and XAGE-1

[1495] To further evaluate the expression profile of L552S and XAGE-1, an electronic express profiling was performed for each antigen. This was done by searching with the same specific primers as disclosed in Example 29 against a public EST database. Results of this profiling confirm that there are two isoforms of the gene. The ratio of expression between L552S and XAGE-1 is about 1:5. In addition, L552S and XAGE-1 seem to be expressed in Hepatoma, CML, germ cell tumor, Ewing's Sarcoma, and Alveolar Rhabdomyosarcoma.

### EXAMPLE 31

### L985P Lung Tumor Antigen Surface Expression

[1496] Small cell lung carcinoma (SCLC) cell lines, NCI-H69, NCI-H128, HTB-171, HTB-173, HTB-175, and DMS 79, were grown in DMEM (Gibco) containing 10% EBS (Hyclone) at 37° C. with 7% CO2. These growing SCLC cell lines were then subjected to FACS analysis to determine whether L985P is expressed on the surface of these SCLC cell lines using an anti L985P peptide polyclonal sera raised against the predicted excellular region of L985P.

[1497] For FACS analysis, cells were collected and washed with ice cold staining buffer (PBS+1% BSA+Azide+10 μg/ml human IgG). The cells were next incubated for one hour on ice either with no primary antibody, with irrelevant rabbit IgG, whole molecule at a final concentration of 20 μg/ml, or with affinity purified rabbit polyclonal sera raised against L985P peptide #3482 (SEQ ID NO: 1930) at a final concentration of 20 μg/ml. The sequence of the L985P peptide #3482 (SEQ ID NO: 1930) represents the predicted extracellular region of the L985P protein. The cells were washed 2 times with staining buffer and then incubated with a 1:100 dilution of a goat anti-rabbit lg(H+L)-FITC reagent (Southern Biotechnology) for 30 minutes on ice. Following two washes, the cells were resuspended in staining buffer containing propidium iodide (PI), a vital stain that allows for identification of permeable cells, and analyzed by FACS.

[1498] In addition, Real-time PCR was performed to determined if L985P mRNA was expressed in these SCLC cell lines. The results of the FACS analysis and the Real time PCR of mRNA expression are presented in Table 26:

TABLE 26

| SCLC Cell | mRNA Expression by Real | Surface Expression by |
|---|---|---|
| Line | Time PCR | FACS |
| NCI-H69 | + | + |
| HTB-173 | + | + |
| HTB-175 | − | − |
| HTB-171 | − | − |
| NCI-H128 | − | − |
| DMS 79 | − | − |

[1499] From the foregoing it will be appreciated that, although specific embodiments of the invention have been described herein for purposes of illustration, various modifications may be made without deviating from the spirit and scope of the invention. Accordingly, the invention is not limited except as by the appended claims.

The application's sequence listing, which the Patent Office published only in electronic form, follows.

SEQUENCE LISTING (2002 sequences)

SEQ ID NO: 1 - DNA, 527 bp, Homo sapiens
ccaccagtccacaaatgtgactggtaagggatctagtaacagaggatggagttgggcagaatattatcctggatgatatgcacccagcactagaatacacctttcattagaatgaagagaacagacaaagccctcagaaaagatacaaaggcagagacattgattagaacattatctcataacagaggtggggccattacccaccattattgtaaaataactgtaactaaccaaaacacatacaggcttctttaatggagttaataaaactatggcacattgggaatcaggggcagaggtactgttcccagacggaaaactgggataaagggagccatgctgacagggccttattccagtctaggttgttagaaaggagccctagcccagaaatgacagcaaatagccataatcattatgtggggctgaaccagaggaagccaggctgagccaagaagctggaagtatcttgaacggctctccaaatccaaagattatccatactctttatccctccagcgatgtgt

SEQ ID NO: 2 - DNA, 490 bp, Homo sapiens
ccaagagttctccactgtgaagactgaaaggacctggtgacatttcggcatcagtcctgttaccacttggaggtaacagaagcaggctcgtgtcctcctttaattctaccacactacatgactcgcaattggttctgaaattagaacgttcaccatcgtacttaaaatcttaggggcatgaagagtcagctagaacaaggaaaaagaaagtcgcaggtagtaggtaagtaggtgggcacatgaaaagccaagctgctctgtccaacaccagtgtacatgtgctttaactaaatgaactccagaggccaacagcagcagacctgctcaattcaccttccaaatcagaacaagaccaaaaagctcaggcttgagttgtcaactatgcataggttccgccagtgctgaggggtgtgaggctctagttgtgaagaagctacaagaaatcatgatgcatgtgatctgggccgcactggcatttgcagctattcag

SEQ ID NO: 3 - DNA, 464 bp, Homo sapiens
ggagctgtgggctcagtcgtggggcagattgcaaagctcaagggctgcaaagttgttggagcagtagggtctgatgaaaaggttgcctaccttcaaaagcttggatttgatgtcgtctttaactacaagacggtagagtctttggaagaaaccttgaagaaagcgtctcctgatggttatgattgttattttgataatgtaggtggagagttttcaaacactgttatcggccagatgaagaaatttggaaggattgccatatgtggagccatctctacatataacagaaccggcccacttcccccaggcccacccccagagattgttatctatcaggagcttcgcatggaagcttttgtcgtctaccgctggcaaggagatgcccgccaaaaagctctgaaggacttgctgaaatgggtcttagagtttaaatttcagcttccctactttgtaattgactgact

SEQ ID NO: 4 - DNA, 510 bp, Homo sapiens
ccttatcacactgtaagtggtccaagcccatagggatgctctttttggttcctggaatttccagttggatgtgacagagatctttcagtataggtctaagtcaagagtagcctctgggttgaggtgggctgggagattaacatcttacctggggtccttcagataaacctgttggtttttcctgtctcatacaggcccatcttaagttttgatgttgaattaaaactacttctacccccttagttataaaaaaggccacaaggagcatttatgtggatatctggaagtgagatagttattccattcccaggaaaagaaaaataaagctaagttacaaaactaaatctatatgcaataaagttattatatactgctttgtttaagcagagtcctctggaatttatgtacagtacattagttttcagctatttatattccacaagttagaccttaagattctctggttttaagacaattgttaaagatacttctaaagctctgagcagttca

SEQ ID NO: 5 - DNA, 452 bp, Homo sapiens
acagcgcctcacgcacctgagccccgaggagaaggcgctgaggaggaaactgaaaaacagagtagcagctcagactgccagagatcgaaagaaggctcgaatgagtgagctggaacagcaagtggtagatttagaagaagagaaccaaaaacttttgctagaaaatcagcttttacgagagaaaactcatggccttgtagttgagaaccaggagttaagacagcgcttggggatggatgccctggttgctgaagaggaggcggaagccaaggtaaatcatctcctttatttggtgcctcatgtgagtactggttccaagtgacatgacccagcgattatgtttacagtctggacttctgatcaagagcgttcttgaaattttccttcagttttaagacattttcatgcaggcagagtgttcttcccctaaaggcacttgacactcatttttt

SEQ ID NO: 6 - DNA, 336 bp, Homo sapiens
tatagagtgctgacatctgacattgagaaattcatgcctattgtttatactcccactgtgggtctggcttgccaacaatatagtttggtgtttcggaagccaagaggtctctttattactatccacgatcgagggcatattgcttcagttctcaatgcatggccagaagatgtcatcaaggccattgtggtgactgatggagagcgtattcttggcttgggagaccttggctgtaatggaatgggcatccctgtgggtaaattggctctatatacagcttgcggagggatgaatcctcaagaatgtctgcctgtcattctggatgtgggaaccgaa

SEQ ID NO: 7 - DNA, 376 bp, Homo sapiens
ctgtgggaaacctcattgttctgtacaaagtactagctaaaccagaaaggtgattccaggaggagttagccaaacaacaacaaaaacaaaaaatgtgctgttcaagttttcagctttaagatatctttggataatgttatttctattttttattttttttcattagaagttaccaaattaagatggtaagacctctgagaccaaaattttgtcccatctctaccccctcacaactgcttacagaatggatcatgtcccccttatgttgaggtgaccacttaattgctttcctgcctccttgaaagaaagaaagaaagaagactgtgtttttgccactgatttagccatgtgaaactcatctcattacccttttctg

SEQ ID NO: 8 - DNA, 406 bp, Homo sapiens
ggtagggagcaattctattatttggcattgcatggctgggttgaattaaaacagggagtgagaacaggtgagtctagaagtccaactctgaaaaggaccactgtacatttgaacacacggctgtgttaaagatgctgctaatgtcagtcactgggtgcactaaaggatctcttattttatgtaaaacgttgggattgacaagatagatctgatactctgttaagttaccctctgaagctacttcttgtgaaatactaatgacagcatcatcctgccaagcgaaagaggcaggcataagcaaggacaaattaaaagggggtaagagccttatcatgatgaggagtcttgttttgacatcttgggaaaagctgtccatagtgtgaagtcgtcaatttctcaccatggt

SEQ ID NO: 9 - DNA, 330 bp, Homo sapiens
actactaccaagagctgcagagagacatttctgaaatgtttttgcagatttataaacaagggggttttctgggcctctccaatattaagttcaggccaggatctgtggtggtacaattgactctggccttccgagaaggtaccatcaatgtccacgacgtggagacacagttcaatcagtataaaacggaagcagcctctcgatataacctgacgatctcagacgtcagcgtgagtgatgtgccatttcctttctctgcccagtctggggctggggtgccaggctggggcatcgcgctgctggtgctggtctgtgttctggttgcgctgg

SEQ ID NO: 10 - DNA, 449 bp, Homo sapiens
ctgacggctttgctgtcccagagccgcctaaacgcaagaaaagtcgatgggacagttagaggggatgtgctaaagcgtgaaatcagttgtccttaatttttagaaagattttggtaactaggtgtctcagggctgggttggggtccaaagtgtaaggaccccctgcccttagtggagagctggagcttggagacattaccccttcatcagaaggaattttcggatgttttcttgggaagctgttttggtccttggaagcagtgagagctgggaagcttcttttggctctaggtgagttgtcatgcgggtaagttgaggttatcttgggataaagggtcttctagggcacaaaactcactctaggtttatattgtatgtagcttatattttttactaaggtgtcaccttataagcatctataaattgagttctttttcttagttgtatgg

SEQ ID NO: 11 - DNA, 472 bp, Homo sapiens
cctcgatgcatgctgctctacctctcatcagcccacagtctgacacgaggtcatctttggtctgtggtgaggtatggatgtctgcagtctacacaacagccctgcagaacgggcctggacaacccttgggggataagacagccacacatggctcaggctgttaggtgtccactgtcacagtccaaagagaaaggtacggcctccaagggggcagcttaagccaacatgtaagacttgggcacgatgaaaggacgggggtccagctacgaatgtttttgttcttgatgtcaagttgccagctactggaaggcaggagcagtttcttctttttcccactctgtgctgggtacttgggagaggcgaaataaataccagactgtccactcctcagcctaaggtccttctcaagtcctgcacactcagcacttgctctttaacgtggcatatgttcccccatcttcccctggtaatg

SEQ ID NO: 12 - DNA, 371 bp, Homo sapiens
ttttttttttttttttttttttttggaratttgkcacattttattcagwatttctgctgcactgccagcctagggatgcacttgattcccaagaaatgcaactgtcctattcgcaragccgtccacaggtacctaccccctggactgcagcaactttattaccttaactagcacaraacagaggttgatttaaactccttacactcacttctcaratcaatgaatgggcaaaraaacmcctcatggctctgggaaggcatgctgaracccgtttttgcaagtcctgaggaatggaaraatatagctgccaggtatcccaagtctagggcagggagggkagtatcggcatcactttcactgcattctgttgg

SEQ ID NO: 13 - DNA, 493 bp, Homo sapiens
  misc_feature 198, 199, 200, 201, 202, 203, 204, 205, 206, 207, 208, 209,210, 211, 212, 213, 214, 215, 216, 217, 218, 219, 220, 221,222, 223, 224, 225, 226, 227, 228, 229, 230, 231, 232, 233,234, 235, 236, 237, 238, 239: n = A,T,C or G
ccagtccaacctgctcctcattattgtataaatgagcagaatcaatatggcggaagccagctycaattgccaatttggtggcctctaaagctttacttttaggaacctctgcaggcgcataggtgccaaatcccaggacaggcatgaagtgaccatcattcagcttcacacactgatatttcgaatccatttctgtcnnnnnnnnnnnnnnnnnnnnnnnnnnnnnnnnnnnnnnnnnnccaacctgctcctcattattgtaaacatgtgcagaatcaatatggcggaacccagcttctattgctaattttgtgacctccaaagctttacttctcggaaccttggttcttccgagcgctcagcaatcccgccgagcttctttgagacgtcctcaggtgtcctttgacgatgcgtcctccactttcacacactctagcattccttcactggggtcttcattgccccacattgggcagccaggaatgttggggtg

SEQ ID NO: 14 - DNA, 540 bp, Homo sapiens
ccagatggtccataatatgtcaccgagcaggtgaatggcatttgtatgtcagccttggttgtcttgtactccagggtggaagtcatggtatagagctgagtcactgggtccatttcctttttaaaattatgaccaccgctccttcaaggggatgtagcacttttccattcctgtaccatgtgatattgccatctggataactgtcttctgaaatgcagtcacccaacttttttagctgctctgtttcgagaaacagtgctttgcttacaatttcaggtttagatggttgcttgaacaccttgactattgtaggtgcctcaaacacgttgtcctcagttactagcatgcacacaaatctcttttcatcactgatccttgcattactgatagacaaagtgtagttttctgagaggttcaatctgtctttgtattctggtacatcgtcgtactgcacacttttctttgtagaggatctgaaggcaataaatactggggagccatcgggcttttcatatttccatttgcccaaacatgagattc

SEQ ID NO: 15 - DNA, 421 bp, Homo sapiens
tacccacctccagcctcccatgtgagcctgtccttatgtatagtgtccaacctctgattctagcagtcaagtgtcttccccaatcctaatgtcccctgatatgtctctagcgacttgaccatctcttgttccttgggactggggccagcctcttgtctgcccacttccctctcattagtcagatagccccaaaggctctatctttagctcccagagaactttttggtcctcagtatttcccttcccctttccttcctattccccacaactgggggagggaagggagaacaggggcacctgatcatcaatctcccctgcccctctcttgaagccccctagatttggatgaagagcaggccagtgagcagggcaaagcctgctaggagcagaatgaccttgaggatcctttgctcagaactgg

SEQ ID NO: 16 - DNA, 236 bp, Homo sapiens
gccgtgtgtgcttttcccagtgccgaggtacctatcgctcacggccaggagcttgtcgtggctgacagcaaagagctgctctctgtgggcctgcttcatctcatccgagaggccgtacaagaagtggtccattcctttgtctgaaggagcgacaggagcatctacggttgagaagacagaaagtttggcttcgtcgatgtcttgctgtgtgaattttccagacttagcccagtcga

SEQ ID NO: 17 - DNA, 424 bp, Homo sapiens
ccagaaaggtgacagtggttttccagggcctcctgggcctccaggtccacctggtgaagtcattcagcctttaccaatcttgtcctccaaaaaaacgagaagacatactgaaggcatgcaagcagatgcagatgataatattcttgattactcggatggaatggaagaaatatttggttccctcaattccctgaaacaagacatcgagcatatgaaatttccaatgggtactcagaccaatccagcccgaacttgtaaagacctgcaactcagccatcctgacttcccagatggtgaatattggattgatcctaaccaaggttgctcaggagattccttcaaagtttactgtaatttcacatctggtggtgagacttgcatttatccagacaaaaaatctgagggagtaagaatttcatcatgg

SEQ ID NO: 18 - DNA, 154 bp, Homo sapiens
gtcaccaactccttcagcgcctccacagggstttcggacatgacagcaaccttttctcccaggacaattgaaatttgctaaagggaaaggggaaagaaagggaaaagggagaaaaagaaacacaagagacttaaaggacaggaggaggagatgg

SEQ ID NO: 19 - DNA, 445 bp, Homo sapiens
caacaaaattggtgaacacatggaagaacatggcatcaagtttataagacagttcgtaccaattaaagttgaacaaattgaagcagggacaccaggccgactcagagtagtagctcagtccaccaatagtgaggaaatcattgaaggagaatataatacggtgatgctggcaataggaagagatgcttgcacaagaaaaattggcttagaaaccgtaggggtgaagataaatgaaaagactggaaaaatacctgtcacagatgaagaacagaccaatgtgccttacatctatgccattggcgatatattggaggataaggtggagctcaccccagttgcaatccaggcaggaagattgctggctcagaggctctatgcaggttccactgtcaaagtgtgactatgaaaatgttccaaccactgtatttactcctttggaatatgg

SEQ ID NO: 20 - DNA, 211 bp, Homo sapiens
gggtgccactgcctgcttgaaagcactttctgaacctacagaagttgggtattgtctgaaatcccagaggacccataagtgccggtgacaagctgtctgtcaggggagaggctccagaacctgggttcgtccccagtgagaccggaggatgatcccccaaggactgcgcagcatcagctcttggtgggcctctgccttctcttctgtttgg

SEQ ID NO: 21 - DNA, 396 bp, Homo sapiens
tgcccctgtattggattgccacacggctcacattgcatgcaagtttgctgagctgaaggaaaagattgatcgccgttctggtaaaaagctggaagatggccctaaattcttgaagtctggtgatgctgccattgttgatatggttcctggcaagcccatgtgtgttgagagcttctcagactatccacctttgggtcgctttgctgttcgtgatatgagacagacagttgcggtgggtgtcatcaaagcagtggacaagaaggctgctggagctggcaaggtcaccaagtctgcccagaaagctcagaaggctaaatgaatattatccctaatacctgccaccccactcttaatcagtggtggaagaacggtctcagaactgtttgtttcaattgg

SEQ ID NO: 22 - DNA, 277 bp, Homo sapiens
ggaaccatgtggccggcgcccttgatcgtgagaaaggcgatgtgggagaactccttcacgaagccggcaatctgctccccgctgtccccgtacttcactaaccagggccggcgctgcacctccatcttctggttgagggaatccacaaaccactcatcccccatgaaattgcaggccatgtctacatctccattatataataggatctgggatttctgtgagctaagcagcttcagatactgggagttcatgcttcggtagagacggcggtactgta

SEQ ID NO: 23 - DNA, 634 bp, Homo sapiens
tctgaccatccatatccaatgttctcatttaaacattacccagcatcattgtttataatcagaaactctggtccttctgtctggtggcacttagagtcttttgtgccataatgcagcagtatggagggaggattttatggagaaatggggatagtcttcatgaccacaaataaataaaggaaaactaagctgcattgtgggttttgaaaaggttattatacttcttaacaattctttttttcagggacttttctagctgtatgactgttacttgaccttctttgaaaagcattcccaaaatgctctattttagatagattaacattaaccaacataattttttttagatcgagtcagcataaatttctaagtcagcctctagtcgtggttcatctctttcacctgcattttatttggtgtttgtctgaagaaaggaaagaggaaagcaaatacgaattgtactatttgtaccaaatctttgggattcattggcaaataatttcagtgtggtgtattattaaatagaaaaaaaaaattttgtttcctaggttgaaggtctaattgatacgtttgacttatgatgaccatttatgcactttcaaatgaatttgctttcaaaataaatgaagagcag

SEQ ID NO: 24 - DNA, 512 bp, Homo sapiens
gcaaaacaagcctaagcaagcacaacgaagagcagaagtcagtgaaattaaaaagaggaaaaagaaaaatcataaaaatcataaaaagttatttctttgaaaagatcaatgaaatttagcaagactgacacagataaaaaggaattagacccaaatcagtgaacaggaatgaaatagaggatatcactacagaggctgcagccattgaaaggataattaggaaatcccacagataactttgtgctcataaatttgacaatgtagaggaaatatctttagttttaattagctttttattttagtttttctcaaaaactaaaacttaataaaactcaaccaagacaaaatagacaatcagaatgtaggcatacctcagagatgtggcggatttggtttcagactactgcaataaaccaaatatggcaataaaaggagtcacagaaagtggtttcccagtgtatatatataaaagttacatttactctatgaagtgcaataacattttgtctaaa

SEQ ID NO: 25 - DNA, 461 bp, Homo sapiens
ctctgtttcagcacctcattgggattattgaactcattaaattctttacatgaacttgaattgttcattgaaatctctagccatttccctggttaaacaggataatctttttttttcactaaagaacattcgtggtggtttagtgatgaggttaatattcccctcttgtccacctccacattggaaaaaccacgttggactgagttttgaggagcaaagaactaatcacttgaccaaaggggccctgtatccccacaagccctgggtatttttctctcatagagagaagagggtctgtatggatacctgaaaatgtgattttatatattcttggcatccaggggagaaaaatcaaaaagcaaggaagttacagttatctccccagaaattaatgggtcatgtcaagactataggttttcatttccttctgttgcttgttagaatgatgttcttgtgggaaa

SEQ ID NO: 26 - DNA, 317 bp, Homo sapiens
tgctggagtcggaactgctgcctttgtttggcggccttgtttcttaaatcagttccctcttaggatttattacactaaaaaaaaattagtttttgaaaagaaataggagaatacagaaacatgaatttcacgaggctatcatctaacagtgggggctttctacacacgtggtgccaaaatgtgtcattctgagtcaattgcaattcctctctaggagtgaaaagagataaaagataagccaagaaccctggacagattcttggtgttggtgacaaagaggaaaggacctgagaatggggctggtggggagagggggg

SEQ ID NO: 27 - DNA, 250 bp, Homo sapiens
taattgctgtgattattagaattctatcatgactgtattgtagtttttgctctattycagataagcmagatctaagaagttatcaaaactattctttaaaatgctaaagcaggtaactttttcttccattattttttcctcctaccactgagttttgtaatgaattccttgtgtatacaagcaatacaggtgaatactaaactgttatttttagcttcttcaaaagctattttagaaagcttcctggaaa

SEQ ID NO: 28 - DNA, 532 bp, Homo sapiens
cctatatcattcatttatacagaagctgcttgctgcttagcaagttggtgggtttgattttccttggttgctttgcagacctcccttgagaggattccttctggatggagatttctttgttgctgtctcccttgccacaactctgaccaagattgcattgcgctatgtagctttggttcaggagaagaaaaagcaaaattcttttgttgctgaggctatgttgctcatggctactatcctgcatttgggaaaatcctctcttcctaagaagccaattactgatgatgatgtggatcgaatttccctgtgcctcaaggtcttgtctgaatgttcacctttaatgaatgacattttcaataaggaatgcagacagtccctttctcacatgttatctgctaaactagaagaagagaaattatcccaaaagaaagaatctgaaaagaggaatgtgacagtacagcctgatgaccccatttccttcatgcaactaactgctaagaatgaaatgaactgcaaggaagatcagtttcag

SEQ ID NO: 29 - DNA, 486 bp, Homo sapiens
ctgtttttggacttaattaacywttgcaagtggaaaccaagaaataattgtagcataactctctctattgtcatgttgcttctttctgcaaatatatcttacaagttagactttaaacctttgatctcccacaccaaaagagaaaataatatttatatggaagtaattttattttagtgtttgtgatttattgtggagagcaggbgtttaaaaattttagaatttctttttaacaaaatcaaatacattgttaaggtaacaaagaataattcactatttcagcatttcaaagcaacatattctacaacttcaaagatatttgcaaaaataatacaactgttgaagttcaaatgttatggaaagaaacattagaagtatgaaaagtggtacaaaaacatgtttctttttattctcttggatatatatctatatatttaggaaaatacatatatgtatgtgtatgtatatatatgtatgaaaatatac

SEQ ID NO: 30 - DNA, 240 bp, Homo sapiens
aagacctgaggaaggaaaacaaattggcttcctgctgaagaakcaaaatagacattttttaatgtctcttgaccccagttccaagttcaccctgttgcctgttcttcctcccaccttttggggttctataactgcatcccccacacatctttcaccaccaccccatacataccagctctcctgttgtgggattcaggacataggaagagttgctgaaggcacgggtgcttttgggattcg

SEQ ID NO: 31 - DNA, 233 bp, Homo sapiens
ccattgatgcaggatatcggcacattgactgtgcctatgtctatcagaatgaacatgaagtgggggaagccatccaagagaagatccaagagaaggctgtgaagcgggaggacctgttcatcgtcagcaagttgtggcccactttctttgagagaccccttgtgaggaaagcctttgagaagaccctcaaggacctgaagctgagctatctggacgtctatcttattcactgg

SEQ ID NO: 32 - DNA, 233 bp, Homo sapiens
gaggaatgctggactggaggcccctggagccagatggcaagagggtgacagcttcctttcctgtgtgtactctgtccagttcctttagaaaaaatggatgcccagaggactcccaaccctggcttggggtcaagaaacagccagcaagagttaggggccttagggcactgggctgttgttccattgaagccgactctggccctggcccttacttgcttctctagctctctagg

SEQ ID NO: 33 - DNA, 319 bp, Homo sapiens
ctgggcctggatggtctaggatagccttactcacttgcctggcaggtgacaggctgttggctggaattgcttggttctcctccatgtggcctctccagtaggctagctcaggcttattcacatgatggcttcaggattccaaagagagtgagagtagaagctgaaagacttcttgagttcttggcctggaactgggactaggacagtgtcacttctgctaagttcttttggtcagagcaaatcacaaggctttacccagattcaagggatgagaaacagactacatgtcttgatgaggggaaccacaaagagcttgtgg

SEQ ID NO: 34 - DNA, 340 bp, Homo sapiens
tacagatttaattcatgttattaactccctgccttttacctcctccctcctcccttggcacaactgccagatggatgtggctggaagtcagaggacattctcgtgggttcgtgggcctagggtacaaatgacctcagcgtgacagcaaacaggacagagaagaccaggctcttactcaggaatccaccagccaggagaatgacaatgttgaacaccggaaccctgatgatatctgtcacatttgtaaggttgatttcagagtcaggagtggagacatcggcagttgacttgggtggagcttgggtcacagttctggggctggtatagagtgggcacaagg

SEQ ID NO: 35 - DNA, 170 bp, Homo sapiens
acatgggtccttcactcctcgctgagatgttgcggcagccttttcttccaatgcggttgtggcaggagaatccacggatgtaatgttttcacctttttccctgagggtgctttctgaggaaccagyccttaagaggtggggtcttggattcctgacccaggcgtccggca

SEQ ID NO: 36 - DNA, 475 bp, Homo sapiens
ctgtttttggacttaattaaccattgcaagtggaaaccaagaaataattgtagcataactctctctattgkcatgttgcttctttctgcaaatatatcttagaagttagactttaaacctttgatctcccacaccaaaagagaaaataatatttatatggaagtaattttattttagtgtttgtgatttattgtggagagcaggtgtttaaaaattttagaatttctttaacaaaattctaaagagaaaataaaaaagaaatcacagtatttacagagataacagaatggcttagccatgcaaaacaaataactttggtttttccccttttactttggtttaaatgttgaccaagattcaattttttttcctgccaaataaaacttcaataaaagtttagaggcaaaataacgtattttctttttttcccataatattttatacagcatcgagtctaagaatattttatgcattt

SEQ ID NO: 37 - DNA, 246 bp, Homo sapiens
ccttgagcttgggccgggcactgaggcgccccacatatgctgagagcagggggaacgcatccaggcagccaggggctaggacctcatggatcagcagcaagtccagcaggttgtagtcagcgaaggagatctggtctcccacaatgaaggtcttgcctccctggttctgggacagcagggtctcaaaaggcttcagttgcccgggcagtgccttcacatagtcatccttgcccacctcatagttgg

SEQ ID NO: 38 - DNA, 512 bp, Homo sapiens
gctggaagtgaaatgcagatcagacccattgtgatgtcacagaaagatggggacaggccaaagaaaaaagtgactttcaactcttcttccatcatttttatcatcaccagtgatgaatcactgtcagttgacgacagcgacaaaaccaatgggtccaaagttgatgtaatccaagttcgtcctttgtaggaatgaagaatggcaacgaaagatggggccttaaattggatgccacttttggactttcatcataagaagtgtctggaatacccgttctatgtaatatcaacagaaccttgtggtccagcaggaaatccgaattgcccatatgctcttgggcctcaggaagaggttgaacaaaaacaaattcttttaattcaacgggtgctttacataatgaaaaaaccacttgtggcacacgatgggcatctaacatcatcatcttctaatgtgttggagattttcatttcaaatatattttttaaattactctattttccaaaacacgtaat

SEQ ID NO: 39 - DNA, 370 bp, Homo sapiens
ttttatgaacaagatataaggatcaaaaaaaagggtgttgatatgtttttccaagcagagatgtactcgactctgtcctatttagccttcccatacctgacttctaatcacttttcctggtgccctyccatctccctaaccccccctcacagggatgcctcctcccaaggctccagaaactctgaccctcgcactgctggagggagcccatgaattgctggtcaatatcgctcatcctctakactccatcctgcgtgtgcttcttcctacaagagctagagaggcactgactgataaatacctgtcacctgcccctttcccagagggtgaaactccacccactcccactgcagaaatgaatcttaaatgg

SEQ ID NO: 40 - DNA, 204 bp, Homo sapiens
cctgagggttttccctttaaattttcattgagttgtccatctccagcatatagggcttcaggagcagagcagaccttgtttttagtggttccatgggataaaatgggattggaggagctagaagaattcagggtctggtccaatctgccagtcttcctgaaatatcgaaaatacaccagggctgctatatcagagccaccctgg

SEQ ID NO: 41 - DNA, 447 bp, Homo sapiens
caggcagcaattcgtaaagaattaaatgagtacaaaagtaatgaaatggaggtacatgcatcaagcaagcacttgacaagattccacaggccatagagattttcttctgagaagaatttgtgtttaattttttgataccaacactgaacattcatcagggaactttcctgaagttcagctcaagactaccctacctgctgtgtttgtgagaagagtaggatcacacacacaggtgcaatcttgaccacacttacctgcaagaggagtaaccagaggacacacttccttccttctttggtgtctgaggagtgtgaactgttggggtcagttaagacccaacataactctatcagaagaaaactgttgtttgcctttcaaccttgttttacagttctgcagtgtagtggaggacgggcaacgtgcatgtgcaggctcaccactcccagg

SEQ ID NO: 42 - DNA, 498 bp, Homo sapiens
ctggttttgtaaaaacagtctctttattctactgtgctgaaaccctcaccaatatagaaaattagattctcattgcactgaactatatttatatgcctaagtatgtagaagtaaaattatataccccaaaaggattttatcttgttgtatatattaaatgttatttctgcatatagggtcttttatggagaaactgatgatgataagcttaatactcacttgtttagcagcatctgaatgcacaaatgctttatatatctcttctgctttacagggcaaaagatcagactctgttttcttatagtcttcacaagccagccagaactcaatattctcctcactgaattcagactttaggaaacttccaaagacattttgaccagtttggttggcaagaagtttttccagagattgagaccattgcattacttcagcagcagaaagtacatccttggacttggaagatttcattccagattccagatgtgggatcataga

SEQ ID NO: 43 - DNA, 312 bp, Homo sapiens
caggaaggcggccaagaatgtgagtgcaaagattggttcctgagagccccgagaagaaaattcatgacagtgtctgggctgccaaagaagcagtgcccctgtgatcatttcaagggcaatgtgaagaaaacaagacaccaaaggcaccacagaaagccaaacaagcattccagagcctgccagcaatttctcaaacaatgtcagctaagaagctttgctctgcctttgtaggagctctgagcgcccactcttccaattaaacattctcagccaagaagacagtgagcacacctaccagacactcttcttctc

SEQ ID NO: 44 - DNA, 417 bp, Homo sapiens
ctaacacatttactctccactattcgtactctggtagccatgttaaccccatcagagattccttctcaagccatgtctcagagctgagaggcatcccagcaagttttgcagctcacagttttttccgtaaattacttattctataaaattggagtaggccataaactttggagggccctagaccaattttttggattatttttcgtcttctatcattccgctgatcttagatattctctgcattaaatattaaatatcacttctaggctgaaaaatccccctaaaaatatttctagctcagatttttcctccaaattctgcaatagaagatcacaatgtgaactctgcatctccatgttaaagtctaatggacattcacacttagcatgtctcaaagaaatctcatgtaaaccatgg

SEQ ID NO: 45 - DNA, 494 bp, Homo sapiens
cgcgtgtctgtggtatgtgtacacgtgcatgttctgcatgtctgtaggtcacacatgctttggtgcatgtacacgtgtgtgtgtgtatgcgtgtaggagctcacacttgtgtacacgtttgtgtgcatgcatgtgtgcaggagcttgcacgtttgtggtgggtacatgtacatatgtgagtgatcctgtgtgcaagcccccatgtggacatggctatgagtgagcgtggagccaaaagccaggtaacacgcatgcagcaggcccactgtgcgtgtctgagacggtctgtggcagggactgggtgtgaatcatgcagcaggcccactgtgcgtgtctgagacggtctgtggcagggactgggtgtgaatcagtgaccgtgtctctgaccaacatgctgaattacaaattgataatttattaacctgtgcagcaacaaataagatttttcaaaactcaacaaagtgctcaaagttgacattacttgcttcaaagtt

SEQ ID NO: 46 - DNA, 516 bp, Homo sapiens
ccagtccaacctgctcctcattattgtataaatgagcagaatctatatggcggaacccagcttctattgctaattttgtgacctccaaagctttacttctcggaacctcctcctttggccgtcatttgatcattcaactctttgtcagtggcaactcccgctattttggtgtgttggtttgttactacacagtgagcacaaacatggtggtccaatacagaggctcttcctgtcaggtgtcaaccagaaagttcatctaacactgtgatatttgcatccttcttgaacagttgttggctgaagattcatttgatgaatcgatttttcaaaagagatgattcttggttcttccgagcgctcagctctcccgccgagcttctttgagacgtcctcaggtgtcctttgacgatgcgtcctccactttcacacactctagcattccttcactggggtcttcattgccccacattgggcagccaggaatgttggggtgatcagacacaacaccaggtcatg

SEQ ID NO: 47 - DNA, 459 bp, Homo sapiens
ccaattcagagtggcattctgcatttctgtggcttccaagtcttagaacctcaactgacatatagcattgggcacactccagcagacgcccgaattcaaatcctggaaggatggaagaaacgcctggagaatatttgggatgagacaccactgtattttgctccaagcagcctctttgacctaaacttccaggcaggattcttaatgaaaaaagaggtacaggatgaggagaaaaacaagaaatttggcctttctgtgggccatcacttgggcaagtccatcccaactgacaaccagatcaaagctagaaaatgagattccttagcctggatttccttctaacatgttatcaaatctgggtatctttccaggcttccctgacttgctttagtttttaagatttgtgtttttctttttccacaaggaataaatgagagggaatcgaksaaaaaaaaaaaa

SEQ ID NO: 48 - DNA, 430 bp, Homo sapiens
cctatattcagccacagcctctgggagtggtgctgataatcggagcttggaattaccccttcgttctcaccattcagccactgataggagccatcgctgcaggaaatgctgtgattataaagccttctgaactgagtgaaaatacagccaagatcttggcaaagcttctccctcagtatttagaccaggatctctatattgttattaatggtggtgttgaggaaaccacggagctcctgaagcagcgatttgaccacattttctatacgggaaacactgcggttggcaaaattgtcatggaagctgctgccaagcatctgacccctgtgactcttgaactgggagggaaaagtccatgttatattgataaagattgtgacctggacattgtttgcagacgcataacctggggaaaatacatgaattgtgg

SEQ ID NO: 49 - DNA, 288 bp, Homo sapiens
ccatccgaagcaagattkcagatggcagtgtgaagagagaagacatattctacacttcaaagctttggwgcaattcccatcgaccagagttggtccgaccagccttggaaaggtcactgaaaaatcttcaattggattatgttgacctctaccttattcattttccagtgtctgtaaagccaggtgaggaagtgatcccaaaagatgaaaatggaaaaatactatttgacacagtggatctctgtgccacgtgggaggccrtggagaagtgtaaagatgcaggattgg

SEQ ID NO: 50 - DNA, 411 bp, Homo sapiens
ccagagaatgacattcatgtccccgtggatcccttgcagagagtacatggagccactgccaccagtggtgatggaaagcactgtcttcttactccggaagggtcctttgtcatacatggcagcgtaagtgtaagcaaactctcctatgaacactcgctcaaaccagcctttcagaatggcagggactccaaaccactgcagggggaactggaatatcacaaggtctgcggcttccagcttcttttgttcagccacaatatctgggctcagatggccttctttataagccagaacagactcggcaggatactgaaagttcgcagggtccttcagtttacctgtgatgtcctttctggaaatgatgggattgaagttcatggcatagaggtccgactccaccacctcccatcc

SEQ ID NO: 51 - DNA, 503 bp, Homo sapiens
gatatcttatgattaaaaacaaattaaattttaaaacacctgaagatatattagaagaaattgtgcaccctccacaaaacatacaaagtttaaaagtttggatctttttctcagcaggtatcagttgtaaataatgaattaggggccaaaatgcaaaacgaaaaatgaagcagctacatgtagttagtaatttctagtttgaactgtaattgaatattgtggcttcatatgtattattttatattgtacttttttcattattgatggtttggactttaataagagaaattccatagtttttaatatcccagaagtgagacaatttgaacagtgtattctagaaaacaatacactaactgaacagaagtgaatgcttatatatattatgatagccttaaacctttttcctctaatgccttaactgtcaaataattataaccttttaaagcataggactatagtcagcatgctagactgagaggtaaacactgatgcaattaaga

SEQ ID NO: 52 - DNA, 503 bp, Homo sapiens; identical to SEQ ID NO: 51

SEQ ID NO: 53 - DNA, 531 bp, Homo sapiens
tttttttttttttttaaaatgaggatattttattatttcaggtaattttcccagaggkgagaatagtacatgggaaattctctttaggccaggtctagtattacagkgtggkgctcaaggccgcccatcagaacagtgatactctcccaacagatttcatccaccccgtctccactaacttttgccataaaaattcctctgaattgtatcttcttggaagaagtaaatatctgttcgactatacaaagaaacagagaaaccactcccattgcaatcaatcttcaagagagggagcaggcaagccgtgttctttctgctgagttttatagactctgacaagctgtgaaataaacataaacagaagacaaaacagtgccacaaataagcagtagatgaccctgtgacaagacggcattgcagaacaaagactgacgtttaaaggggagtcatgcagagtaacatgggaacacaagcctgacaacctggtcagcttccacttactctagctcctttgaactctcaacactaaaa

SEQ ID NO: 54 - DNA, 450 bp, Homo sapiens
ccatgggtgtctggagcwccctgaaactgtatcaaagttgtacatatttccaaacatttttaaaatgaaaaggcactctcgtgttctcctcactctgtgcactttgctgttggtgtgacaaggcatttaaagatgtttctggcattttctttttatttgtaaggtggtggtaactatggttattggctagaaatcctgagttttcaactgtatatatctatagtttgtaaaaagaacaaaacaaccgagacaaacccttgatgctccttgctcggcgttgaggctgtggggaagatgccttttgggagaggctgtagctcagggcgtgcactgtgaggctggacctgttgactctgcagggggcatccatttagcttcaggttgtcttgtttctgtatatagtgacatagcattctgctgccatcttagctgtggacaaaggggggtcag

SEQ ID NO: 55 - DNA, 648 bp, Homo sapiens
caacttcaaccacaggctgctggasatgatcctcarcaagccagggctcaagtacaagcctgtctgcaaccaggtggaatgtcatccttacttcaaccagagaaaactgctggatttctgcaagtcaaaagacattgttctggttgcctatagtgctctgggatcccaccgagaagaaccatgggtggacccgaactccccggtgctcttggaggacccagtcctttgtgccttggcaaaaaagcacaagcgaaccccagccctgattgccctgcgctaccagctrcagcgtggggttgtggtcctggccaagagctacaatgagcagcgcatcagacagaacgtgcaggtgtttgaattccagttgacttcagaggagatgaaagccatagatggcctaaacagaaatgtgcgatatttgacccttgatatttttgctggcccccctaattatccattttctgatgaatattaacatggagggcattgcatgaggtctgccagaaggccctgcgtgtggatggtgacacagaggatggctctatgctggtgactggacacatcgcctctggttaaatctctcctgcttggygayttcagcaagctacagcaaagcccattggccggaaaaaatatcaagggtcaaat

SEQ ID NO: 56 - DNA, 536 bp, Homo sapiens
ctggcatgagaatatttttttttttaagtgcggtagtttttaaactgtttgtttttaaacaaactatagaactcttcattgtcagcaaagcaaagagtcactgcatcaatgaaagttcaagaacctcctgtacttaaacacgattcgcaacgttctgttattttttttgtatgtttagaatgctgaaatgtttttgaagttaaataaacagtattacatttttaaaactcttctctattataacagtcaatttctgactcacagcagtgaacaaacccccactccattgtatttggagactggcctccctataaatgtggtagcttcttttattactcagtggacctgcccgggcggccgctcgaagccgaattccagcacactggcggccgttactagtggatccgagctcggtaccaagcttggccgtaatcatggtcatagctgtttcctgtgtgaaattgttatccgctcacaattccacacaacatacgagccggaagcataaagtgtaaagcctggggtgcctaatgagt

SEQ ID NO: 57 - DNA, 391 bp, Homo sapiens
aggaactactgtcccagagctgaggcaaggggatttctcaggtcatttggagaacaagtgctttagtagtagtttaaagtagtaactgctactgtatttagtggggtggaattcagaagaaatttgaagaccagatcatgggtggtctgcatgtgaatgaacaggaatgagccggacagcctggctgtcattgctttcttcctccccatttggacccttctctgcccttacatttttgtttctccatctaccaccatccaccagtctatttatttgtctagttggatttcatttcttctggaaaatttattgtttattggcatgtgacccttgactgatggcttcattagcattytgtttttctttttggatccttaatagaaaactcaat

SEQ ID NO: 58 - DNA, 455 bp, Homo sapiens
gaagacatgcttacttccccttcaccttccttcatgatgtgggaagagtgctgcaacccagccctagccaacgccgcatgagagggagtgtgccgagggcttctgagaaggtttctctcacatctagaaagaagcgcttaagatgtggcagcccctcttcttcaagtggctcttgtcctgttgccctgggagttctcaaattgctgcagcagcctccacccagcctgaggatgacatcaatacacagaggaagaagagtcaggaaaagatgagagaagttacagactctcctgggcgaccccgagagcttaccattcctcagacttcttcacatggtgctaacagatttgttcctaaaagtaaagctctagaggccgtcaaattggcaatagaagccgggttccaccatattgattctgcacatgtttacaataatgaggagcaggttggactgg

SEQ ID NO: 59 - DNA, 398 bp, Homo sapiens
  misc_feature 264, 266: n = A,T,C or G
ctcagaggcagcgtgcgggtgtgctctttgtgaaattccaccatggcgtaccgtggccagggtcagaaagtgcagaaggttatggtgcagcccatcaacctcatcttcagatacttacaaaatagatcgcggattcaggtgtggctctatgagcaagtgaatatgcggatagaaggctgtatcattggttttgatgagtatatgaaccttgtattagatgatgcagaagagattcattctaaaacaaagtcaagaaaacaactngntcggatcatgctaaaaggagataatattactctgctacaaagtgtctccaactagaaatgatcaatgaagtgagaaattgttgagaaggatacagtttgtttttagatgtcctttgtccaatgtgaacattt

SEQ ID NO: 60 - DNA, 532 bp, Homo sapiens
gacttctgagacctggggcacccgggcctttgcggcagctactggcagggcctggccacctcataggactcagttcccttctgaacactcgggggacatgggcctctaactgcccactctgatatgcctgggtgagcctaggagggaaggctctgatttggatttctccagtcaaagctcacagaaaaaaacctggcactttgattttcatgggatggtcctaacagggtcagtcacctccgagcagtttgggaacccagtttcttgtcctgggccctcaggtcagcctggctgaattaggacccttccttggcacaggggtgagaaagagcttggggaacgcttggcattatggagggctggaaggggctcaaccccgatttggagagaagtttgggatggagtgggcgagagattgagagagcgagcaggaaaagaggtcttggagcctgggactgatggtggataaggcctggaaagaasatgacsaggaggaggagagagggaagtgggtggatgaggagcaggctga

SEQ ID NO: 61 - DNA, 466 bp, Homo sapiens
gcgacggcgacgtctcttttgactaaaagacagtgtccagtgctccagcctaggagtctacggggaccgcctcccgcgccgccaccatgcccaacttctctggcaactggaaaatcatccgatcggaaaacttcgaggaattgctcaaagtgctgggggtgaatgtgatgctgaggaagattgctgtggctgcagcgtccaagccagcagtggagatcaaacaggagggagacactttctacatcaaaacctccaccaccgtgcgcaccacagagattaacttcaaggttggggaggagtttgaggagcagactgtggatgggaggccctgtaagagcctggtgaaatgggagagtgagaataaaatggtctgtgagcagaagctcctgaagggagagggccccaagacctcgtggaccagagaactgaccaacgatggggaactgatcctgaccatgacggcgga

SEQ ID NO: 62 - DNA, 548 bp, Homo sapiens
ttttgaatttacaccaagaacttctcaataaaagaaaatcatgaatgctccacaatttcaacataccacaagagaagttaatttcttaacattgtgttctatgattatttgtaagaccttcaccaagttctgatatcttttaaagacatagttcaaaattgcttttgaaaatctgtattcttgaaaatatccttgttgtgtattaggtttttaaataccagctaaaggattacctcactgagtcatcagtaccctcctattcagctccccaagatgatgtgtttttgcttaccctaagagaggttttcttcttatttttagataattcaagtgcttagataaattatgttttctttaagtgtttatggtaaactcttttaaagaaaatttaatatgttatagctgaatctttttggtaactttaaatctttatcatagactctgtacatatgttcaaattagctgcttgcctgatgtgtgtatcatcggtgggatgacagaacaaacatatttatgatcatgaataatgtgctttgtaaaaagatttc

SEQ ID NO: 63 - DNA, 547 bp, Homo sapiens
tttccaaagcggagacttccgacttccttacaggatgaggctgggcattgcctgggacagcctatgtaaggccatgtgccccttgccctaacaactcactgcagtgctcttcatagacacatcttgcagcatttttcttaaggctatgcttcagtttttctttgtaagccatcacaagccatagtggtaggtttgccctttggtacagaaggtgagttaaagctggtggaaaaggcttattgcattgcattcagagtaacctgtgtgcatactctagaagagtagggaaaataatgcttgttacaattcgacctaatatgtgcattgtaaaataaatgccatatttcaaacaaaacacgtaatttttttacagtatgttttattaccttttgatatctgttgttgcaatgttagtgatgttttaaaatgtgatcgaaaatataatgcttctaagaaggaacagtagtggaatgaatgtctaaaagatctttatgtgtttatggtctgcagaaggatttttgtgatgaaaggggattttttgaaaaat

SEQ ID NO: 64 - DNA, 528 bp, Homo sapiens
  misc_feature 374, 443, 444, 452, 476, 489, 515, 523: n = A,T,C or G
cacctmctcccsccwggcgcttwctcsgacgccttgcccascgggccgcccgaccccctgsrccatggaccccgctcgcccsctggggmtgtygatkctgctgcttttcctgrckgaggctgcactgggcgatgctgatcargagccaacaggaaataacrcggagatctgkctcctgcccctagactackgaccctgcckggccctacttytccgytactactacgacaggyacacgcagagctgccgccwgttcctgkrckggggctgcrasggcaacrccaacwattyctacacckgkgaggmttrcgackatgctwgstggargatagaaaaagttcccaaastttgccggctgmaagtgaatgaggacnaccagggtgaggggtacacagataagtatttctttaatctaakkwccatgacatgwgaaaaattctttnncggtgggngtcaccggaccggattgagaacangtttgcagatgangctactgggatgggctcctgcrcacnaaagaaantatca

SEQ ID NO: 65 - DNA, 547 bp, Homo sapiens
  misc_feature 408: n = A,T,C or G
kgaatgaasaacgaacgctggaagtagaaatagagcctggggtgagagacggcatggagtacccctttattggagaaggtgagcctcacgtggatggggagcctggagatttacggttccgaatcaaagttgtcaagcacccaatatttgaaaggagaggagatgatttgtacacaaatgtgacagtctcattagttgagtcactggttggctttgagatggatattactcacttggatggtcacaaggtacatatttcccgggataagatcaccaggccaggagcgaagctatggaagaaaggggaagggctccccaactttgacaacaacaatatcaagggctctttgataatcacttttgatgtggattttccaaaagaacagttaacagaggaagcgagagaangtatcaaacagctactgaaacaagggtcagtgcagaaggtatacaatggactgcaaggatattgagagtgaataaaattggactttgtttaaaataaagtgaataagcgatatttattatctgcaaggttttttttgtg

SEQ ID NO: 66 - DNA, 535 bp, Homo sapiens
ggggaggtctacgcttctagagcttgagccagcggggcgaccctgcagtggcaggactcggcaccgcgccctccaccgccggttggtggcctgcgtgacagtttcctcccgtcgacatcgaaaggaagccggacgtgggcgggcagagagcttcatcgcagtaggaatggcagccccatctatgaaggaaagacaggtctgctggggggcccgggatgagtactggaagtgtttagatgagaacttagaggatgcttctcaatgcaagaagttaagaagctctttcgaatcaagttgtccccaacagtggataaaatattttgataaaagaagagactacttaaaattcaaagaaaaatttgaagcaggacaatttgagccttcagaaacaactgcaaaatcctaggctgttcataaagattgaaagtattctttctggacattgaaaaagctccactgactatggaacagtaatagtttgaatcatagtgaacatcaatacttgttccctatatacgacacttgataattaaga

SEQ ID NO: 67 - DNA, 527 bp, Homo sapiens
atttctgccacttaattcaaacagtcatatgcaggtcgcttaatttatttgtgcttttgtttcatcttctacaaggccctcttagctctaaaacttgacagtggaataaggaaatgtttttccaaatctgcattgccggtgagatcctcaacatcagcatgttgagatggacctcaaccccacctctaaccctgaaacacactactcgatattatcttaggtatgttttagggtttagtttgtaaaataataatttatttttgaaggaaatataaaatattaaagagtaataatagctatcattttttaagattcaatctaaaacaatggactctttttttttccatttgtgatgtagataagcaagacaattttgatcatgagtggtgaaaagaggatcaaacttgactattcttgcaatggcagtccagcaacaagcctttcatttacattaaattataacttttcattcattcctaaaccaaacttaaaattctgctttcctttgagtagaaggtatttaactt

SEQ ID NO: 68 - DNA, 431 bp, Homo sapiens
gggaaacttcatgggtttcctcatctgtcatgtcgatgattatatatggatacatttacaaaaataaaaagcgggaattttcccttcgcttgaatattatccctgtatattgcatgaatgagagatttcccatatttccatcagagtaataaatatacttgctttaattcttaagcataagtaaacatgatataaaaatatatgctgaattacttgtgaagaatgcatttaaagctattttaaatgtgtttttatttgtaagacattacttattaagaaattggttattatgcttactgttctaatctggtggtaaaggtattcttaagaatttgcaggtactacagattttcaaaactgaatgagagaaaattgtataaccatcctgctgwtcctttagtgcaatacaataaaactctgaaattaaaact

SEQ ID NO: 69 - DNA, 399 bp, Homo sapiens
gacacggcggacacacacaaacacagaaccacacagccagtcccaggagcccagtaatggagagccccaaaaagaagaaccagcagctgaaagtcgggatcctacacctgggcagcagacagaagaagatcaggatacagctgagatcccagtgcgcgacatggaaggtgatctgcaagagctgcatcagtcaaacaccggggataaatctggatttgggttccggcgtcaaggtgaagataatacctaaagaggaacactgtaaaatgccagaagcaggtgaagagcaaccacaagtttaaatgaagacaagctgaaacaacgcaagctggttttatattagatatttgacttaaactatctcaataaagttttgcagctttcaccaaraaaaaaaaa

SEQ ID NO: 70 - DNA, 479 bp, Homo sapiens
cgcggcggagctgtgagccggcgactcgggtccctgaggtctggattctttctccgctactgagacacggcggacacacacaaacacagaaccacacagccagtcccaggagcccagtaatggagagccccaaaaagaagaaccagcagctgaaagtcgggatcctacacctgggcagcagacagaagaagatcaggatacagctgagatcccaggtgctgggaagggaaatgcgcgacatggaaggtgatctgcaagagctgcatcagtcaaacaccggggataaatctggatttgggttccggcgtcaaggtgaagataatacctaaagaggaacactgtaaaatgccagaagcaggtgaagagcaaccacaagtttaaatgaagacaagctgaaacaacgcaagctggttttatattaggatatttgacttaaactatctcaataaagttttgcagctttcaccaaaaaaaaaaaa

SEQ ID NO: 71 - DNA, 437 bp, Homo sapiens
ctcagcggctgccaacagatcatgagccatcagctcctctggggccagctataggacaacagaactctcaccaaaggaccagacacagtgrgcaccatgggacagtgtcggtcagccaacgcagaggatgctcaggaattcagtgatgtggagagggccattgagaccctcatcaagaactttcaccagtactccgtggagggtgggaaggagacgctgaccccttctgagctacgggacctggtcacccagcagctgccccatctcatgccgagcaactgtggcctggaagagaaaattgccaacctgggcagctgcaatgactctaaactggagttcaggagtttctgggagctgattggagaagcggccaagagtgtgaagctggagaggcctgtccgggggcactgagaactccctctggaattcttgggggg

SEQ ID NO: 72 - DNA, 561 bp, Homo sapiens
ggatggtatactgtaaattcagcatatggagataccattatcataccttgccgacttgacgtacctcagaatctcatgtttggcaaatggaaatatgaaaagcccgatggctccccagtatttattgccttcagatcctctacaaagaaaagtgtgcagtacgacgatgtaccagaatacaaagacagattgaacctctcagaaaactacactttgtctatcagtaatgcaaggatcagtgatgaaaagagatttgtgtgcatgctagtaactgaggacaacgtgtttgaggcacctacaatagtcaaggtgttcaagcaaccatctaaacctgaaattgtaagcaaagcactgtttctcgaaacagagcagctaaaaaagttgggtgactgcatttcagaagacagttatccagatggcaatatcacatggtacaggaatggaaaagtgctacatccccttgaaggagcggtggtcataatttttaaaaaggaaatggacccagtgactcagctctataccatgacttccaccctggagtacaagacaaccaaggctgac

SEQ ID NO: 73 - DNA, 916 bp, Homo sapiens
ggagaaaataaggtggagtcctacttgtttaaaaaatatgtatctaagaatgttctagggcactctgggaacctataaaggcaggtatttcgggccctcctcttcaggaatcttcctgaagacatggcccagtcgaaggcccaggatggcttttgctgcggccccgtggggtaggagggacagagagacagggagagtcagcctccacattcagaggcatcacaagtaatggcacaattcttcggatgactgcagaaaatagtgttttgtagttcaacaactcaagacgaagcttatttctgaggataagctctttaaaggcaaagctttattttcatctctcatcttttgtcctccttagcacaatgtaaaaaagaatagtaatatcagaacaggaaggaggaatggcttgctggggagcccatccaggacactgggagcacatagagattcacccatgtttgttgaacttagagtcattctcatgcttttctttataattcacacatatatgcagagaagatatgttcttgttaacattgtatacaacatagccccaaatatagtaagatctatactagataatcctagatgaaatgttagagatgctatatgatacaactgtggccatgactgaggaaaggagctcacgcccagagactgggctgctctcccggaggccaaacccaagaaggtctggcaaagtcaggctcagggagactctgccctgctgcagacctcggtgtggacacacgctgcatagagctctccttgaaaacagaggggtctcaagacattctgcctacctattagcttttctttatttttttaactttttggggggaaaagtatttttgagaagtttgtcttgcaatgtatttataaatagtaaataaagtttttaccattaaaaaaa

SEQ ID NO: 74 - DNA, 547 bp, Homo sapiens
agtggcattaacttttagaatttgggctggtgagattaattttttttaatatcccagctagagatatggcctttaactgacctaaagaggtgtgttgtgatttaattttttcccgttcctttttcttcagtaaacccaacaatagtctaaccttaaaaattgagttgatgtccttataggtcactacccctaaataaacctgaagcaggtgttttctcttggacatactaaaaaatacctaaaaggaagcttagatgggctgtgacacaaaaaattcaattactgtcatctaatgccagctgttaaaagtgtggccactgagcatttgattttataggaaaaaatagtatttttgagaataacatagctgtgctattgcacatctgttggaggacatcccagatttgcttatactcagtgcctgtgatattgagtttaaggatttgaggcaggggtaattattaaacatattgcttctattcttggaaaaatagaagkgtaaaatgttaataatacaaatgtcactgtgacctcctccactgagagg

SEQ ID NO: 75 - DNA, 793 bp, Homo sapiens
tgaggaagttgcaagccaacaaaaaagttcaaggatctagaagacgattaagggaaggtcgttctcagtgaaaatccaaaaaccagaaaaaaatgtttatacaaccctaagtcaataacctgaccttagaaaattgtgagagccaagttgacttcaggaactgaaacatcagcacaaagaagcaatcatcaaataattctgaacacaaatttaatatttttttttctgaatgagaaacatgagggaaattgtggagttagcctcctgtggagttagcctcctgtggtaaaggaattgaagaaaatataacaccttacaccctttttcatcttgacattaaaagttctggctaactttggaatccattagagaaaaatccttgtcaccagattcattacaattcaaatcgaagagttgtgaactgttatcccattgaaaagaccgagccttgtatgtatgttatggatacataaaatgcacgcaagccattatctctccatgggaagctaagttataaaaataggtgcttggtgtacaaaactttttatatcaaaaggctttgcacatttctatatgagtgggtttactggtaaattatgttattttttacaactaattttgtactctcagaatgtttgtcatatgcttcttgcaatgcatattttttaatctcaaacgtttcaataaaaccatttttcagatataaagagaattacttcarattgagtaattcagaaaaactcaagatttaagttaaaaagtggtttggacttgggaacaggactttatacct

SEQ ID NO: 76 - DNA, 461 bp, Homo sapiens
accttgcactattcccctcagtccatctatcgaggtctttgcaggaagcatactgggaattgaaacgagagcctaaatgacatctaagaaaggcagtgttcaataccaggtattaggtgaggatgggattctaaggacatcagtgggaggcagggagccaccttcagacctcagcatggaagcttccaagatccagaggaagaggcaacagcactgagagtcataggtagaagaatcatcacagccctgctaaccaggcagctgatgcccctctcccctggctccctgtgtccaaatcctacaggggcatctgttggctgaactcaacctgaagccaaagagaagatgagtggagagaggcaacatttatagagctcaggtttctagggctggagagggatctggagggacacacaggagacacctggcataaccaaaaaatgattaaaaaaaaaaaaaaa

SEQ ID NO: 77 - DNA, 642 bp, Homo sapiens
ggttgcacgaaacacactggggaatggagcaaaacagtctttgaatatcgaacacgcaaggctgtgagactacctattgtagatattgcaccctatgacattggtggtcctgatcaagaatttggtgtggacgttggccctgtttgctttttataaaccaaactctatctgaaatcccaacaaaaaaaatttaactccatatgtgttcctcttgttctaatcttgtcaaccagtgcaagtgaccgacaaaattccagttatttatttccaaaatgtttggaaacagtataatttgacaaagaaaaatgatacttctctttttttgctgttccaccaaatacaattcaaatgctttttgttttatttttttaccaattccaatttcaaaatgtctcaatggtgctataataaataaacttcaacactctttatgataacaaaaaaaarawawattctttgaatcctagcccatctgcagagcaatgactgtgctcaccagtaaaagataacctttctttctgaaatagtcaaatacgaaattagaaaagccctccctattttaactacctcaactggtcagaaacacagattgtattctatgagtcccagaagatgaaaaaaattttatacgttgataaaact

SEQ ID NO: 78 - DNA, 519 bp, Homo sapiens
gcagaagaagaagcggaccttccgcaagttcacctaccgcggcgtggacctcgaccagctgctggacatgtcctacgagcagctgatgcagctgtacagtgcgcgccagcggcggcggctgaaccggggcctgcggcggaagcagcactccctgctgaagcgcctgcgcaaggccaagaaggaggcgccgcccatggagaagccggaagtggtgaagacgcacctgcgggacatgatcatcctacccgagatggtgggcagcatggtgggcgtctacaacggcaagaccttcaaccaggtggagatcaagcccgagatgatcggccactacctgggcgagttctccatcacctacaagcccgtaaagcatggccggcccggcatcggggccacccactcctcccgcttcatccctctcaagtaatggctcagctaataaaaggcgcacatgactccaaaaaaaaaaaaaaaagggcggccgccaccgcgggggagctccacttttgttccctttaatga

SEQ ID NO: 79 - DNA, 526 bp, Homo sapiens
gtctggaggcggtgtcctctccgccctgtcgggtcctggatgagtacgagttatggtcacggtcacagcctgatctcttatgtgttcatagccattcgctctcccatcagaactgtttgtcctgaatgtgttcctctagttctagaaaatgaccactaatttaaaaaactcggttgtgaggtttgcccagaggcacttgttccagaatttcccctcctgcttcagccatgtccttgtcacttggcattctaagctaaagctttagcttcccaattcgtgatgtgctaggccaagattcgggagctgttgccagcctcgtcaaatatggaagagaaacaacctgcggtcaaaagggagtgatttgttaagtggtgcgcgtctatctcataactagatgtaccaaccagggaagggccaaggatggaaaggggtaacttttgtgcttccaaagtagctaagcagaagtgggggagcagtttagccagatgatctttgattaggcaaacattgagttttaaagaggctg

SEQ ID NO: 80 - DNA, 281 bp, Homo sapiens
gttatattagtgggtagtgtaacattttatccaggttggggtgaggggagatggccacagtagcaagtggtgacactaaataccattttgaaggctgatgtgtatatacatcattactgtccgtagcaatgaaggatacagtactgtgttgtgggtgagtgttgctattgcccagcattaatatttgggtgtgtatgtttgaggctatgaaacacgcaggagtgtttttgtgctattaattttaagagaaagcagctttttcttaaaattcactgttgaga

SEQ ID NO: 81 - DNA, 405 bp, Homo sapiens
  misc_feature 219, 230, 261, 306: n = A,T,C or G
gtgggtgggagcgcgtgctgttgggagttgcttggaggttggcggcgcggggctgaaggctagcaaaccgagcgatcatgtcgcacaaacaaatttactattcggacaaatacgacsacgaggagtttgastatcgacatgtcatgctgcccaaggacatakccaasctggtccctaaaacccatctgatgtctgaatctgaatggaggaatcttggcngttcagmagantcagggatgggtccattatatgatccatganccagaacctcdcatcttgctgttccggcgscccacttaccccaanaaaccaamgaaatgaaccttggctactacttttcaatcctcaaakcttttcacavhtgaccttccttcctaacattctttmtgataaacatttattaag

SEQ ID NO: 82 - DNA, 547 bp, Homo sapiens
tagtttttaagaagaaattttttttggcctatgaaattgttaaacctggaacatgacattgttaatcatataataatgattcttaaatgctgtatggtttattatttaaatgggtaaagccatttacataatatagaaagatatgcatatatctagaaggtatgtggcatttatttggataaaattctcaattcagagaaatcatctgatgtttctatagtcactttgccagctcaaaagaaaacaataccctatgtagttgtggaagtttatgctaatattgtgtaactgatattaaacctaaatgttctgcctaccctgttggtataaagatattttgagcagactgtaaacaagaaaaaaaaaatcatgcattcttagcaaaattgcctagtatgttaatttgctcaaaatacaatgtttgattttatgcactttgtcgctattaacatcctttttttcatgtagatttcaataattgagtaattttagaagcattattttaggaatatatagtkgtcacagtaaatatcttgttttttctatg

SEQ ID NO: 83 - DNA, 529 bp, Homo sapiens
ctattctaagagatgctcttagtgatcttgcattacactttctgaataaaatgaagatcatggtgattaaggatattgaaagagaagacattgaattcatttgtaagacaattggaaccaagccagttgctcatattgaccaatttactgctgacatgctgggttctgctgagttagctgaggaggtcaatttaaatggttctggcaaactgctcaagattacaggctgtgccagccctggaaaaacagttacaattgttgttcgtggttctaacaaactggtgattgaagaagctgagcgctccattcatgatgccctatgtgttattcgttgtttagtgaagaagagggctcttattgcaggaggtggtgctccagaaatagagttggccctacgattaactgaatattcacgaacactgagtggtatggaatcctactgcgttcgtgcttttgcagatgctatggaggtcattccatctacactagctgaaaatgcccggcctgaatcccatttctacagtaacag

SEQ ID NO: 84 - DNA, 527 bp, Homo sapiens
cccatcaccagaatcccttcatgggagggatggatgcctgttgaaactcactgacctattggactgacgctggggtggtatcttcatcagagctattgtaagtcatccaaaaggcttctgacgaaagaacaatttttaaaaagtccctcttttcaatcaagccaatgtcctattttatttctaaaagttttgggactcgtgctgttatcaagtacaatgaaaatggctttataaatagctgttttgacattgtgatagaaggcttgaatacggaggaaagatgtcgctggagctagtcctgagttccgactgtccctgtggtgggaatccagtctgggaaagcaggactgttttagcaaacgtgtactcgttctataaaaatggaatctgttctgcaggttaccgtccctccccgcccaagcatcccctctgtcctgtctctctgctgctgggacccagggctttttcagctgcagaacccactggacttccaggaatcaaggaaaaagtggaaatgtccaactgtg

SEQ ID NO: 85 - DNA, 401 bp, Homo sapiens
cagtgtggtggaattcccaagatagaaatgaaaaactcttttatagagtgctgacatctgacattgagaaattcatgcctattgtttatactcccactgtgggtctggcttgccaacaatatagtttggtgtttcggaagccaagaggtctctttattactatccacgatcgagggcatattgcttcagttctcaatgcatggccagaagatgtcatcaaggccattgtggtgactgatggagagcgtattcttggcttgggagaccttggctgtaatggaatgggcatccctgtgggtaaattggctctatatacagcttgcggagggatgaatcctcaagaatgtctgcctgtcattctggatgtgggaaccgaaaatgaggagttacttaaagatcca

SEQ ID NO: 86 - DNA, 547 bp, Homo sapiens
gaagcctcttgtgtttgtgtgcagagaagtatatgatccaccatgctaatgacacttgcctttttttccaccattaaggctttaagaacatgtggaataagttttttagctgctaatgacaaaacaaatcctgtaactacccagccagcaagtatatagcacagaacactgtgttactttacaagggcttatgtgactggaataaggtggtcccacttgactgttccaaagagcagcttctcagatcttcagtgttcactggtaaatttctaacagtgtatttgtgtaaagtttgtcatttcatactccatacactacagttgctgtcactgatccctgttttgctggcttttaagctacttggtcaaaaatcctgcttccttaaaacatagagaattaatgagcatctcaagctttttcttttcctttttaatgatgcctgcactatcaagagtattctagtgttctctctttgtttggcatataatcatgcaccaaactttttatttctttaaggtgggagtatatttttatttcctaaatgcca

SEQ ID NO: 87 - DNA, 530 bp, Homo sapiens
atggattcgaaataccagkgtgtgaagctgaatgatggtcacttcatgcctgtcctgggatttggcacctatgcgcctgcagaggttcctaaaagtaaagctctagaggccgtcaaattggcaatagaagccgggttccaccatattgattctgcacatgtttacaataatgaggagcaggttggactggccatccgaagcaagattgcagatggcagtgtgaagagagaagacatattctacacttcaaagctttggagcaattcccatcgaccagagttggtccgaccagccttggaaaggtcactgaaaaatcttcaattggactatgttgacctctatcttattcattttccagtgtctgtaaagccaggtgaggaagtgatcccaaaagatgaaaatggaaaaatactatttgacacagtggatctctgtgccacrtgggaggccatggagaagtgtaaagatgcaggattggccaagtccatcggggtgtccaacttcaaccacaggctgctggagatgatcct

SEQ ID NO: 88 - DNA, 529 bp, Homo sapiens
acctgagctaagaaggataattgtcttttggtaactaggtctacaggtttacatttttctgtgttacactcaaggataaaggcaaaatcaattttgtaatttgtttagaagccagagtttatcttttctataagtttacagcctttttcttatatatacagttattgccacctttgtgaacatggcaagggacttttttacaatttttattttattttctagtaccagcctaggaattcggttagtactcatttgtattcactgtcactttttctcatgttctaattataaatgaccaaaatcaagattgctcaaaagggtaaatgatagccacagtattgctccctaaaatatgcataaagtagaaattcactgccttcccctcctgtccatgaccttgggcacagggaagttctggtgtcatagatatcccgttttgtgaggtagagctgtgcattaaacttgcacatgactggaacgaagtatgagtgcaactcaaatgtgttgaagatactgcagtcatttttgt

SEQ ID NO: 89 - DNA, 547 bp, Homo sapiens
gtttatatatatagcgaataaatctagttgtataaatttttaaatgccgtcagtagaaagcacacaaggttatgatttttttaattactggcttctgatttctttcacttctgatccttttcctttttctcagatgtagctgagtcttgatcattttaagacaacgatgggtagaattttgagattaatgttaattttccctttttgttaatttcagtcccctctcactatgcttttgtccagaaggatcaagaattctaccatcccttgggtctttgtgtataaacaatgttaaataaaggtagactcagtctttaagatattagacagtttttttagtccatgggattgtaaatataaacattaactttcctataagaatattttggctttgtaatctatagcctcaaattggtatttattatggattcactagacaaacagctgtttccttattgtcttttttctttagtgtttctgatttgctatcagtagctgtttttaaagccatccaaggaaaataattatttacagtttttgaagtcac

SEQ ID NO: 90 - DNA, 528 bp, Homo sapiens
gagcagcagaagctgtacagcaagatgatcgtggggaaccacaaggacaggagccgctcctgagcctgcctccagctggctggggccaccgtgcggggtgccaacgggctcagagctggagttgccgccgccgcccccactgctgtgtcctttccagactccagggctccccgggctgctctggatcccaggactccggctttcgccgagccgcagcgggatccctgtgcacccggcgcagcctacccttggtggtctaaacggatgctgctgggtgttgcgacccaggacgagatgccttgtttcttttacaataagttgttggaggaatgccattaaagtgaactccccacctttgcacgctgtgcgggctgagtggttggggagatgtggccatggtcttgtgctagagatggcggtacaagagtctgttatgcaagcccgtgtgccagggatgtgctgggggcggccacccgctctccaggaaaggcacagctgaggcactgtggctggcttcggcctcaacat

SEQ ID NO: 91 - DNA, 547 bp, Homo sapiens
atataccatttaatacatttacactttcttatttaagaagatattgaatgcaaaataattgacatatagaactttacaaacatatgtccaaggactctaaattgagactcttccacatgtacaatctcatcatcctgaagcctataatgaagaaaaagatctagaaactgagttgtggagctgactctaatcaaatgtgatgattggaattaraccmtttggscyttgraccttymtwrgraaaawgrmccmacctttyttaacmtgraccwccytmatctctagaagctgggatggacttactatyctkgttwatattttaaatackgaaaggtgctatgcttctgttattattccaagactggagataggcagggctaaaaaggtattattatttttcctttaatgatggtgctaaaattcttcctataaaattccttaaaaataaagatggtttaatcactaccattgtgaaaacataactgttagacttcccgtttctgaaagaaagagcatcgttccaatgcttgttcactgttcctctgtc

SEQ ID NO: 92 - DNA, 527 bp, Homo sapiens
  misc_feature 393, 502: n = A,T,C or G
gctggctagtaggggaacatgtagtagccaagcccatgcattgcagtgcacagagcaacattggggtaacaggatgggtacctgtcacggcctgtgcaaacataacatgtgtcaccacactgaaggtatggtggaacaagtggcctcaccaaggtcggaccccaatggactttttgcctcttgggagcttatgggtctatgaggacacagtagcctttcctatcagcaaactggagtggatgttgtatctgggggtggccttatgtacctgctactgttctccccacattgcccagatgcctgtataactgggaggcactgkgctctcagtttttgcgaatgtgatgagccccctggtgtttctacccttttggcaatgactatccctggagncatgtgtcaaaactgtaaagcacaatttactgctctttgcggagcacaccgctcatgctctgaattacacctgaktgtccctcctccwgktawtgaatgaggttgatcnvatcagaaadgtggkgttggcmata

SEQ ID NO: 93 - DNA, 531 bp, Homo sapiens
ggtattcatacagccttcctaaaggcaatgctttccacaggatttaagataccccagaaaggcatcctgataggcatccagcaatcattccggccaagattccttggtgtggctgaacaattacacaatgaaggtttcaagctgtttgccacggaagccacatcagactggctcaacgccaacaatgtccctgccaccccagtggcatggccgtctcaagaaggacagaatcccagcctctcttccatcagaaaattgattagagatggcagcattgacctagtgattaaccttcccaacaacaacactaaatttgtccatgataattatgtgattcggaggacagctgttgatagtggaatccctctcctcactaattttcaggtgaccaaactttttgctgaagctgtgcagaaatctcgcaaggtggactccaagagtcttttccactacaggcagtacagtgctggaaaagcagcatagagatgcagacaccccagccccattattaaatcaacctgagccacatgt

SEQ ID NO: 94 - DNA, 547 bp, Homo sapiens
  misc_feature 547: n = A,T,C or G
gttaaacatggtctgcgtgccttaagagagacgcttcctgcagaacaggacctgactacaaagaatgtttccattggaattgttggtaaagacttggagtttacaatctatgatgatgatgatgtgtctccattcctggaaggtcttgaagaaagaccacagagaaaggcacagcctgctcaacctgctgatgaacctgcagaaaaggctgatgaaccaatggaacattaagtgataagccagtctatatatgtattatcaaatatgtaagaatacaggcaccacatactgatgacaataatctatactttgaaccaaaagttgcagagtggtggaatgctatgttttaggaatcagtccagatgtgagttttttccaagcaacctcactgaaacctatataatggaatacatttttctttgaaagggtctgtataatcattttctagaaagtatgggtatctatactaatgtttttatatgaagaacataggtgtctttgtggttttaaagacaactgtgaaataaaattgtttcaccgcctggtn

SEQ ID NO: 95 - DNA, 1265 bp, Homo sapiens
gtggtcaagcagtgatttttctgggactgcagaagttcctgctgtgcccaacctttattactaactgggaaagacccagggagactgggatgggctcatgattctacatacagaactcatccaagaaaggaggaaaagctgatttttgtgaacgtcgctacttgtgcctgaactaactctcaggcacattagtcagaaaatactacctatggttactcccccaggttcctaaaagtaaagctttagaggccaccaaattggcaattgaagctggcttccgccatattgattctgctcatttatacaataatgaggagcaggttggactggccatccgaagcaagattgcagatggcagtgtgaagagagaagacatattctacacttcaaagctttggtgcaattcccatcgaccagagttggtccgaccagccttggaaaggtcactgaaaaatcttcaattggattatgttgacctctaccttattcattttccagtgtctgtaaagccaggtgaggaagtgatcccaaaagatgaaaatggaaaaatactatttgacacagtggatctctgtgccacgtgggaggccgtggagaagtgtaaagatgcaggattggccaagtccatcggggtgtccaacttcaaccgcaggcagctggagatgatcctcaacaagccagggctcaagtacaagcctgtctgcaaccaggtggaatgtcatccttacttcaaccagagaaaactgctggatttctgcaagtcaaaagacattgttctggttgcctatagtgctctgggatcccaccgagaagaaccatgggtggacccgaactccccggtgctcttggaggacccagtcctttgtgccttggcaaaaaagcacaagcgaaccccagccctgattgccctgcgctaccagctrcagcgtggggttgtggtcctggccaagagctacaatgagcagcgcatcagacagaacgtgcaggtttttgagttccagttgactgcagaggacatgaaagccatagatggcctaaacagaaatgtgcgatatttgacccttgatatttttgctggcccccctaattatccattttctgatgaatattaacatggagggcattgcatgaggtctgccagaaggccctgcgtgtggatggtgacacagaggatggctctatgctggtgactggacacatcgcctctggttaaatctctcctgcttggtgatttcagcaagctacagcaaagcccattggccaga

SEQ ID NO: 96 - DNA, 568 bp, Homo sapiens
ccagtgtggtggaattcggtttaattacaaaatttgatcacgatcatattgtagtctctcaaagtgctctagaaattgtcagtggtttacatgaagtggccatgggtgtctggagcaccctgaaactgtatcaaagttgtacatatttccaaacatttttaaaatgaaaaggcactctcgtgttctcctcactctgtgcactttgctgttggtgtgacaaggcatttaaagatgtttctggcattttctttttatttgtaaggtggtggtaactatggttattggctagaaatcctgagttttcaactgtatatatctatagtttgtaaaaagaacaaaacaaccgagacaaacccttgatgctccttgctcggcgttgaggctgtggggaagatgccttttgggagaggctgtagctcagggcgtgcactgtgaggctggacctgttgactctgcagggggcatccatttagcttcaggttgtcttgtttctgtatatagtgacatagcattctgctgccatcttagctgtggacaaaggggggtcagctggcatgagaatattttt

SEQ ID NO: 97 - DNA, 546 bp, Homo sapiens
ttgtaccgtatctgtaggcatcctgtaaataattccaaggggaaaactaaacgaggacgtgggttgtatcctgccaggttgagtggggctcacacgctagggtgagatgtcagaaagcgcttgtattttaaacaaccaaaaagaattgtaagggtggcttgctgccaggcttgcactgccgttcctgggggtgtgcatcttcgggaaaggtggtggcggggcgtccactaggtttcctgtcccctgctgctccttccgtaagaaaatgaaatattctatgcctaatactcacacgcaacatttcttgtactttgtaagtcgtttgcgagaatgcagaccacctcactaaactgtaaacggtaaagagatttttacttttggtctccgtgagtcgcatctctactaaggtttacacaggaattccacctgaagacttgtgttaaagttctacagcgcgcactgttaactgaacgtctttttcttcagcctatacgcggatccttgttttgagctctcagaatcactcagacaacattttgtaactgc

SEQ ID NO: 98 - DNA, 547 bp, Homo sapiens
tactgggtgccaagctatgtgccaggcactttacatgtattgatttaacacttaacagccactctatattattccctttttacagatgaggcaatttaagctcaaagcatttaagtagacaaccaacctagaatcacatagcaaatgacagaagccagaggcctcccaagtctctctaactccaaaccctatgcttactctactatatcacactaccttgcaataggacaaagggaatatgtggtaaactatgttcccagcatctaaaagccaggagtggttttcatttttctttaagaagatgatagtgtgatttgaaacatatctgaatttcagaagaggggacttttaaaaattgccactcataaggaaagaaagaactttttcacatatttttgaaagaaacgatggtgagaagatattcttgataatagagatatgctaacatttgctttgggtgttttgtaggttagatttttttggtgtgtactttataggcttgcatattgcttactttaaacagctgaagttctaagtaagagtgttc

SEQ ID NO: 99 - DNA, 122 bp, Homo sapiens
cagcctttctgtcatcatctccacagcccacccatcccctgagcacactaaccacctcatgcaggccccacctgccaatagtaataaagcaatgtcacttttttaaaacaaaaaaaaaaaaa

SEQ ID NO: 100 - DNA, 449 bp, Homo sapiens; identical to SEQ ID NO: 10

SEQ ID NO: 101 - DNA, 131 bp, Homo sapiens
ccatgttctctcttgactacgcatatgtgagatttgcccctccgccccgctcgtgatagccatccagatcttttacctggccctgtcttggagaatctgttttcaatctccactgattgcccccttgctgg

SEQ ID NO: 102 - DNA, 199 bp, Homo sapiens
ctgctgcgcctgatgctgggacagccccgctcccagatgtaaagaacgcgacttccacaaacctggattttttatgtacaaccctgaccgtgaccgtttgctatattcctttttctatgaaataatgtgaatgataataaaacagctttgacttgaaaaaaaaaaaaaaaaaaaaaaaaaaaaaaaaaaaaaaaaaaaa

SEQ ID NO: 103 - DNA, 321 bp, Homo sapiens
ttttttaggtttttaaactttttatttgcatattaaaaaaattgtgcattccaataattaaaatcatttgaacaaaaaaaaatggcactctgattaaactgcattacagcctgcaggacaccttgggccagcttggttttactctagatttcactgtcgtcccacccccacttctttcaccccactttttccttcaccaacatgcaaagtctttccttccctgccacccagataatatagacagatgggaaaggcaggcgcggccttcgttgtcagtagttctttgatgtgaaaggggcagcacagtcatttaaacttgat

SEQ ID NO: 104 - DNA, 309 bp, Homo sapiens
tttttttttttttttatttttttttttgcatcaaaaaactttatttccatttggcccaaggcttgttaggatagttaaaaaagctgcctattggctggagggagaggcttaggcaaaacccctattactttgcaaggggcccttcaaaagtctctgggcttctatttcaaccgcgatgatgtggctctggaaggcgtgagccactttttccgggaactggccaaggaaaagcccgagggctacaaccgtttcctgaaaatgcaaaaccagcggggcggccgcgctcttttccaggacatcaaaaagcca

SEQ ID NO: 105 - DNA, 591 bp, Homo sapiens
cttatttctgcatgggtcggagagtgggcgggactgctttactgagttatagtgaatgtagttttaacctaagcgcctcacatgactaactcctcatccatcaagaatgagctcagctctcacttccccactcctcacccccctgtaaagtaacctttctccaaggttatgcttcaacaggaatagctaacatttattaaattgtggcacgtaagtatcttggatatattggctcattgaatcctcacacctactattttacagagatgccagtggggcttgagattgaatcacttgcccaggctcccactgctggtaaacagtagagggggctcctgacccatcagtctggcttgacaacccattccctcaactgcggatcccggattcccttatcaccctgttgatttctccataggctgtggtaacatttgttgcatgaatggaccgttgaaatagggcctggcagggagaaattcaggaaatgaatgaatggttcttccctggcagcctttgatgacttacaagccccttcaagggggaaagccatttttctccctgggactccttgaaagcccgggagccctgcct

SEQ ID NO: 106 - DNA, 450 bp, Homo sapiens
ctgccactcctgcctctgctaccccgaaaccggagagggagctcaataataacacaggtcccactaaactaattaaggtgttggcataacctgtcattgaattcaagtgtccaacaactgtttgcttaaaatatcattagacctaatatttttttcaaaggcacaaagtttaaacatggggggggcgggtgttgagaggggtctgggatacccttaaacccaaaaaagtgatttgttcccccttgcccagaagggtgactgttccactgggcctgtcaccacaggacattttccatgacaagcactcaccttcttggggaaggggcatcaggttggcacaggaaaggcccaagtgaggggccactctgtacattaatactttggtgattaatgtttggggagaggcaggattctcacccacctttttgacttcaaacactctcactcaag

SEQ ID NO: 107 - DNA, 116 bp, Homo sapiens
tcgacgaaagttactgtcactcagttgtaaatccatcagcttttcacctgttaaaaattttgcaaaatatacatgttctcctcctgttttcaattcttccatcttttttcttgagg

SEQ ID NO: 108 - DNA, 291 bp, Homo sapiens
ctgctcgaagttgtcaaaacccacgtgcagggcaatggagagtccgatggccgaccacagcgagtagcgtcctcccacccaatcccagaactcgaacatgttttgagggtcaattccaaactccttcactttggttgtgttagtagacagggcaacaaagtgcttcgccactgcagtaggatccttggccgcctggagaaaccactccttcgccgtctctgcattcgtgatggtctcctgggtagtaaaggtcttggaggcaatgatgaacagggaggactcggggttcag

SEQ ID NO: 109 - DNA, 662 bp, Homo sapiens
gctgtttccacagtacgcctgcctcacaccttgcgatgcgccaacatcaccatcattgagcaccagaagtgtgagaacgcctaccccggcaacatcacagacaccatggtgtgtgccagcgtgcaggaagggggcaaggactcctgccagggtgactccgggggccctctggtctgtaaccagtctcttcaaggcattatctcctggggccaggatccgtgtgcgatcacccgaaagcctggtgtctacacgaaagtctgcaaatatgtggactggatccaggagacgatgaagaacaattagactggacccacccaccacagcccatcaccctccatttccacttggtgtttggttcctgttcactctgttaataagaaaccctaagccaagaccctctacgaacattctttgggcctcctggactacaggagatgctgtcacttaataatcaacctggggttcgaaatcagtgagacctggattcaaattctgccttgaaatattgtgactctgggaatgacaacacctggtttgttctctgttgtatccccagccccaaaagacagctcctggaccttgccccggggcggcccgctcggaaagggggcgaaatttcttcaagaatatttccatttccacaaacttggggccgggggccc

SEQ ID NO: 110 - DNA, 323 bp, Homo sapiens
tcctgtgaaacagcccattttcctacctactgtgggttgctgctcaggaggaacgatatacgccaatacaagcaggaaatctgcagctcctctgctatgtgcctcagaacactttcaatttttctggtcaatgctctgattaggtatcatacataaaagccagcatattagtttaaatctctaacaaaaaactatattttccaaagtcattatcatttgggccaattaagtgatcttttcgtgctttgttgagcttcatctttagggcatctcttctttcttcccattcatgaagttcggcatttccatgtgcaaatttacag

SEQ ID NO: 111 - DNA, 336 bp, Homo sapiens
tccagtgcgctccagccttatctaggaaaggaggagtgggtgtagccgtgcagcaagattggggcctcccccatcccagcttctccaccatcccagcaagtcaggatatcagacagtcctcccctgaccctcccccttgtagatatcaattcctaaacagagccaaatactctatatctatagtcacagccctgtacagcatttttcataagttatatagtaaatggtctgcatgatttgtgcttctagtgctctcatttggaaatgaggcaggcttcttctatgaaatgtaaagaaagaaaccactttgtatattttgtaataccacctctgtgg

SEQ ID NO: 112 - DNA, 218 bp, Homo sapiens
tttttttttttttttttttttccagtcaggagtatttttaatcactgtctacagagacacctacatacacacacgggtggggaatgaacccaaagtttttaggtgaagtctctcagggcccaccccgtgccacagaccttcctcggttgcagagattctgggcaaagcatccgtgctctcatgagattatcctggggagatttagaagaattttgtgg

SEQ ID NO: 113 - DNA, 533 bp, Homo sapiens
ctgcaccgacagttgcgatgaaagttctaatctcttccctcctcctgttgctgccactaatgctgatgtccatggtctctagcagcctgaatccaggggtcgccagaggccacagggaccgaggccaggcttctaggagatggctccagaaaggcggccaagaatgtgagtgcaaagattggttcctgagagccccgagaagaaaattcatgacagtgtctgggctgccaaagaagcagtgcccctgtgatcatttcaagggcaatgtgaagaaaacaagacaccaaaggcaccacagaaagccaaacaagcatcccagagcctgccagcaatttctcaaacaatgtcagctaagaagctttgctctgcctttgtaggagctctgagcgcccactcttccaattaaacattctcagccaagaagacagtgagcacacctaccagacactcttcttctcccacctcactctcccactgtacccacccctaaatcattccagtgctctcaaaaagcatgtttttcaagatctaaa

SEQ ID NO: 114 - DNA, 261 bp, Homo sapiens
  misc_feature 43: n = A,T,C or G
ccatatctgctcggcgctacttctttcttggattgatcctgantgatgcattggcgatgcctttggagaaggacatgtgatgtgatggtcttcacgttccacatgtactcgggcaaatagggggacaaactgaagttaaacaggtcgaaactagaggagctgctgaccctggagctgaccactttcttggggaaaaggacacatgaaggtgctttgcaaaagctgatgagcaatctggacaccaacataggacaacaacgt

SEQ ID NO: 115 - DNA, 267 bp, Homo sapiens
cctctcctgtgggttccagaccctgttccagcaacaattgctgggacacctgggccgactgctccacctcgccaggccctggccctctccatctcagccctgacagccacccagtgataaacacagcaggcttcctaagcaatgtgacgcaccagaggggtggtggtacacgttccccttgaagtcatctgaaaattagagaacagatttgcctcatagctgaagagagaccctattccaagcatgaatggccttgacaatgttcct

SEQ ID NO: 116 - DNA, 239 bp, Homo sapiens
ctgatgacctggggtctagtgaaaatgcagggtcagattcagtgggtctggggtctgaatctctaaggcgctgccaagtgatgctgatgctcctggcttgtggaccaccctgtgtatagcaaagctctagactaggaggtctcaaccttggctgcacagaattatctggggagtttttaaatttcccagtgcccaggctgcattcatatcatagtagagacagggttttgccatgctgg

SEQ ID NO: 117 - DNA, 168 bp, Homo sapiens
aaaaaacttttatattgctgcatcttccacagttctttgggtagtctctgaacttaaaatttgtaggagttgtagactacctaaatttttaagttatggatttgttcataggttgtaggggtaggtaaagaaggaaacagacaagaaaatggcttcttgaggtggcag

SEQ ID NO: 118 - DNA, 150 bp, Homo sapiens
aaaaaaaagagtttatttagaaagtatcatagtgtaaacaaacaaattgtaccactttgattttcttggaatacaagactcgtgatgcaaagctgaagtgtgtgtacaagactcttgacagttgtgcttctctaggaggttgggtttttt

SEQ ID NO: 119 - DNA, 154 bp, Homo sapiens
aaactgtgtgagatattaaccagccgccctgttataaaatcaggaaatccaaacagcgatttacaccgattaacacccccttttatattttttcaaatacactgagaaaataatcaaacgttttcatctctcttgtctttttttgttttttcct

SEQ ID NO: 120 - DNA, 314 bp, Homo sapiens
ctgcgtggagtgacgggaggagggaatcactgtgtgtgcgagagtgcttcagactcaatttccaaaataattttcacccctctaagcatgtaaattcaaagatggatccttcatagaaattaaaaaatcaatttgagctcatttcgaatacagaacaagtatggcacagatggaagtcctgccacgtttcctttaatgatgctgactcttgtatcacacaggccagcatgaagtttcttactcagactttacaggcattttccgtaattcaatcagtcctgctcccagcacaacacaggaggtgattcgagaat

SEQ ID NO: 121 - DNA, 601 bp, Homo sapiens
aaaaaaaacctaattcattgaagtaataaccaaataattttcaatcttgattcaactgtgattcaaatcttacaccatttgccccttctatgaatttatgtataaaattttttaagagtcagagtttttttttcttgattaattggatgtatttcacagaatttccaactgctcacgttagttttcttccttttagagttgatctctctaatgtattagatcttcatgcctttgatagtctctctggaataagtttgcagaaaaaacttcagcatgtgccaggaacacaacctcaccttgatcagagtattgtacaatcacatttgacgtaccaggaaatgcaaaggaagaacatcttaatatgtttattcagaatcttctgtgggaaaagaatgtgagaaacaaggacaatcactgcatggaggtcataaggctgaagggattggtgtcaatcaacgacaaatcacaacaagtgattgtccagggtgtccatgagctctgtgatctggaggagactccagtgagctggaaggatgacactgagagaacaaatcgattggtcctcattggcagaaatttagataaggatatccttaaacag

SEQ ID NO: 122 - DNA, 486 bp, Homo sapiens
ctgtttctaattgcttttgtgactgttaccttttagttcatgcccccccaaagagctaaatttcacatttttacctacaaaattgatttttaattcctgcaaataatttaccattatgagctacaaggtgggcaacagcgcctgaggatctaattttatgcatattactcccaagtattttaacacttgttggagaagcaatatctggatcaataaaacactgtcccatcaaccatttgagtggggagagggagaagctcttctgtaagtaagattctggcaagctctttgaaatgagtcttctttcccacagattttctctactctttcaatacaaacagataggagaagagggaatagaaacctggaggaacttgaatatttttgttctagatagagatacagttattgaaaaggaaacctagaaagtagtcacacgtcgcttatttaggccagaagtaattgtactgggcaaaaatttcactt

SEQ ID NO: 123 - DNA, 239 bp, Homo sapiens
ctggtgggtctttttttcctctcagagctcaagcctgtagtgcctgatgtcatttctttcaagttgcccacagtatctccacttaaactaggctagtaaccaaaataatgtggaccttctttaggaaacagtgtgggagaataggagtccagccgtaagataaactggaaatatttgggcgtcttgtacctggctacgcaccacctcagtgttgttcctacataaacaaggcccctttt

SEQ ID NO: 124 - DNA, 610 bp, Homo sapiens
  misc_feature 4, 12, 30, 73, 75: n = A,T,C or G
ccanccaagtcnttgatgatcactgacccncgcgcgcctgctggaccaaggtggctgcggggaaatcgccacngngctttcggttttcttggtgaaggaatacaccgcgccgacagcaggttttcagtcagggtcagggactgttgcttgcgcgcgaaaatcaccggtacgccgaggttcaggccggtcatgatcgccggtgcaatgcccgaggcttcgatggtgacgatcttggtgatgcccgaatccttgaacaacgcagcgaattcatcaccgatcagtttcatcagcgccgggtcgatctggtggttcagaaaggcgtcgaccttgagtacctgatcggaaagcacgatgccttcttcgcgaattttcttgtgcagtgcttccacgaaagcttcctctgttggcgcaacacgcgccgaaagtagattaaaaagtagtcgattctagcgctttaacatcgcgcgtatatccgccagggcggtattgccgcgaacggctttgacttcggttggtgtgtcgtcgttgccttcccatgccaggtcatccggcggcagttcgtcaaggaaccggctgggggcacaatcaatgatctcgccgtactgcttgc

SEQ ID NO: 125 - DNA, 196 bp, Homo sapiens
ctatagggctcgagcggccgcccgggcaggtaaaaaatcagcccctaatttctccatgtttacacttcaatctgcaggcttcttaaagtgacagtatccttaacctgccaccagtgtccaccctccggcccccgtcttgtaaaaaggggaggagaattagccaaacactgtaagcttttaagaagaacaaagtttt

SEQ ID NO: 126 - DNA, 247 bp, Homo sapiens
aaattagttaaaaaaatgcattcctcatttgatatagccacattccaaatgcttaaaagccgcatgtatctagtgactaccatactggagagtacaaatatagaactttacccgtcactgcagacagttctgttggattgtgcagcattggacaatatatacagtttgcctgtatatgagaaagagagagagagagagagtgtgtgtgtgtgtgtgtgtgtgaagtgcaataaggctgacaggcatc

SEQ ID NO: 127 - DNA, 590 bp, Homo sapiens
cctccacggcatggcgcaattgttgttcaggggccgccaggttgctgcccatgccgatgtagatacgttccacgtgcttactcgccagacgcactcgaagcgtcgccagcgctacgtttgcgcttgctgccactgctgcggcgacgctttttcgggccatcgccggtggcttcgcctttgctgctgagctctttgatcatctcgcggcgctggctgtcgttggcgtcctggtagtcggtccaccactcgccaaggccgtcggtctgttcgccggcgctttcacgcagcagcaggaagtcatagcccggcacggaagcgcgggttgtccagcaacaggtcggcacgtttgccgctgcggcgtggcaggcgctcctgcatgtcccagatttcacggatcggcatggtgaagcgtttcgggatggcgatgcgctggcattgctcggcgatcagctcgtgagcagcttcctgcatggctggaattgccggcatgccacggtcttgcaggcgcatgacgcgtttcgaaagcgcgggccacaacagggcggcaaagaggaacgccggggtgaccggtttgttctgcttgatgcgca

SEQ ID NO: 128 - DNA, 361 bp, Homo sapiens
ctgcccatggaaaccctccaggagctgctggacctgcacaggaccagtgagagggaggccattgaagtcttcatgaaaaactctttcaaggatgtaaccaaagtttccagaaagaattggagactctactagatgcaaaacagaatgacatttgtaaacggaacctggaagcatcctcggattattgctcggctttacttaaggatatttttggtcccctagaagaagcagtgaagcagggaatttattctaagccaggaggccataatctcttcattcagaaaacagaagaactgaaggcaaagtactatcgggagcctcggaaaggaatacaggctgaagaagttctgcagaaatattt

SEQ ID NO: 129 - DNA, 546 bp, Homo sapiens
aaaaatacaaattcagtaagacttttgctctaacaacaatttttcaaaacgaatcaacaacaaaaaagtatccagtgtttcttttcttatgaagatataataaaacacagtattggtaagcacattttaacagtatgcttttcttttgtagggaaaggagatatggctatgtctaacatcgtgggatccaatgtgtttgatatgttgtgccttggtattccatggtttattaaaactgcatttataaatggatcagctcctgcagaagtaaacagcagaggactaacttacataaccatctctctcaacatttcaattatttttctttttttagcagttcacttcaatggctggaaactagacagaaagttgggaatagtctgcctattatcatacttggggcttgctacattatcagttctatatgaacttggaattattggaaataataaaataaggggctgtggaggttgatattattaatagtgttatgcagaaaatatgaatggcagggaggggcagagagaaaaatccatttcttcattt

SEQ ID NO: 130 - DNA, 733 bp, Homo sapiens
  misc_feature 611, 631, 668, 689: n = A,T,C or G
ggggcctcttcctaaaggcactaatcccatccaatagggcttaacctcatgacttaatcaactttcaaagacaccacatcctaatgccatcacatcagaatttaggcttcaacatatgaattttggggggacacaaacattcacctcatagcattcattgtttcttgttattggcaaagccaagactcacattgtctaagttatttgacttttgagtccgcagatgtgaaaacagtgctaaacagtccagcttcatgagtggagaacagcatttgtgacaaccaccaaagtacctctgtggtcagtgtcctcaaccagggcacagcatcatggaccagagcctctgcagggcacagaggagtggtgaggaacaggggctctggagcaaccccacttccctctgctttgtatatggggggttctgcacatgactgcatttgaaaagggcttcactgcgcttgctgaaggagtgcacttgagctagcggagagttcccagagggtgtctggaagaagcaaaggctattctttgtttcactcagttatagatggaagtcagacacttctgcctgaagtactttcacacactccacagtcttaagaaggatgganaaagcatgccaactactcanaaaaccacaggtgttcaagcaatggtatccttttatncctacaactagtggacaaagnggggcctctgtaatttgggaaagctaggaaaactttttctgggg

SEQ ID NO: 131 - DNA, 305 bp, Homo sapiens
  misc_feature 16, 19: n = A,T,C or G
aaacacatacgaatanttnaactgtgattatgaagtgacagccggctaaatatgtcttgtattttctctcttcctttttttgctaactcatcctttattccattcctgcttccatggtaatgcaggctcaaataaattactaggatacaagattacttcaagcctcttttctgtggaactcataatatgataagcatttgttacaagattgcctgtagttgtttaggggacaaattatattagggaaagaaagtctttctttagttggttaaattttctattataattgggtactaaatttattt

SEQ ID NO: 132 - DNA, 545 bp, Homo sapiens
aaacaatgctacactcatttttggcaaagtgctgtattgttcagtctgtgtacaaaactgaccatctatgaaccaatcagtataaaaaatttctataaaaacaaaatttagacagcggctcaagaaaacaagctgccatttatgcatagattgatgtacagtaacctaaccaaatgtcccttttgaattttcaagttactgaaaaaaaatgtgtcgagaaacacattaagaaggcacatgtacagtctacaatactcttcagtctccctaactcatgccctgcccctataaaggaaatatgttcacaattttacttgagaaaaaaaaacaaagccacttaaaaaaaaaaaaacacacacgcaattattaaagttcaaaatctctggaggaaaatacaagcaaaaccactcatacactccaagcctgaaacacacatctaacctccccaggtactggtttggttttcagaggtccacctagaaaacaaatctaaaacttcaggcaaaacagagcaaaactggacatttaacaattacacaattttt

SEQ ID NO: 133 - DNA, 330 bp, Homo sapiens
  misc_feature 36, 68: n = A,T,C or G
aatatttattactaatatcttataatgttttgtggnaccatggcataccttgggtactattgtaacanatagttcaggaaaccctactataaggtttatcaaatggtctcataaacagttacttattcaagcacgccaaagctcagtgaaaagtatttttcacccttactctttctcgtgtcattcaaagagaagttttgatgtagtgtatttatttgtagggagtaatgaacagatccatttcacagtagactttgtgctctaggtgatgcagctaattgccccagtttggaaaacatggacttggatgaattgtcttttgtttgggac

SEQ ID NO: 134 - DNA, 627 bp, Homo sapiens
  misc_feature 99: n = A,T,C or G
aaatattacttcaaatacattttaaagctcaacaaacttgtgttgaactgaattgcagatcctgaactctatttgaaaatacatcatgaaacagaaaancccattccaaatgaaaatgatagtgctttgttgggggtgggaatgaggcggggagactaaatcactattaacagacttcttttcccaatgcaatttgtcaaaagttcaaaagttctgaaatgtactaaatcttaagcaaattaaattcatgatattactaaaactttttaaatagtgcaatgacttatcaagttatagtggctgcattaagaacaaattattgtgtgaaatacctgtataaacacaaaatacaattaaatatttctttacaaaaagctgagcattacgcataatagtggaatgtctttcattaggtgtattttttaaagattaacaaaagtaacatttcctaaaatgtatacatgtgccatatttttgcaaacatgcctgagaatgtatttaaaacatttctgtagtaagagtttgcaagaacttcacaaacctgcaaataaaatgcatctttttaaaaaggtgaaaatggcatctccacactgcaacaattcaaaaagtgcagcatccctaatcttt

SEQ ID NO: 135 - DNA, 277 bp, Homo sapiens
  misc_feature 45: n = A,T,C or G
aaaatcaaatatattatttgttaaaaatcagcttgtttcattacnggaaattacaccagtccgttctatttactttcaaaccatattcaactcctcaactttcaaacatgtaatcaactaatttcaaaagggaaaaggtaccctttataaaggagagatctgttaagacaccaagaaatcaaaattaatatcacttaataattaagtggataacacatgcctcccaatacagtgcagtgagaaacacaaaacatcaattcccgcgtactctgcgttg

SEQ ID NO: 136 - DNA, 486 bp, Homo sapiens
aaaacagaatgaattcattgttacagttacagaagtcagaagcccaaatacagtctgcctgaaccaaagccagggtcagcaaggttcctttccactgttttgccaacttctagaggccacctgtattccttggttcatggcccctctcttcatcatcaaataatcagcatagctttatgacattggcagctctgattttgctcttttgccttcctcttatgtagacccttgtaattacattgggtacacccagataaccccaaataatctccctatctcaagattcttaatgtaattatattgggaaagtcccttttgtcatataagataacatagcaatggattccaaggattagtatgtgagtttcttttgaggggctataattaaccctaccacaatatggaaatgtctattgtttttctatgtaccagaaataagacattaggatgtgaaattaataacataacaccacttacggcatcacc

SEQ ID NO: 137 - DNA, 552 bp, Homo sapiens
  misc_feature 310: n = A,T,C or G
ccatcttgcatcaaatgttcttaaggcagtgactggctatcaaccacagtttctgtctccccagttgcaaacacaggatccatgcaacagttctgagaccatacacttagaaaccacaggggatgcggatcaaatgcagaactcccaaattataaaacagtcaggctacactcaaaacaaaacatagaacatcaacaacacacatctcccaaaaaagaagtgcaacgcatgcttgtataaaccaacaataacaaaaaaaccacaataaaaaatgcagagtctcccaaacaagttttcaaatgtattgcanaaagaaaaaaaatgtatatatatataaaattaaaaagtctgaaatactagtgcatagtcaattacctaacaccaagtttcttttctttctgtccaagctctactgcccctctgatactagcagcatgtctacaggctaagaccatagcagcaaaaaacgtttttcatttggcatttacaaaattaaattactgaataaaaatataattttttataaaactatttcttacagtaataattttt

SEQ ID NO: 138 - DNA, 231 bp, Homo sapiens
aaattttactagtgttacttaatgtatattctaaaaagagaatgcagtaactaatgccctaaatgtttgatctctgtttgtcattactttttcaaaatatttttttctgtaaagtataatatataaaacttcttgcttaaattgaatttctatattagtggttaattgcagtttattaaagggatcattatcagtaatttcatagcaactgttctagtgttttgtgttttt

SEQ ID NO: 139 - DNA, 535 bp, Homo sapiens
cagttgccaaccctctgaaccgtttaggccggttcatcgctgcctttgaatctgggccggtggtgatccggcaaggggtgaaaccaaagagcgggggctgtgaggcccttcgcagtccctcgtaagtcgctgcgatggagtgaactatcacgcatcgtgtttatttcgtcaacacgaaatgtgatttatttttgcgaattaacacggcagttctcggttacgttttcggaaagcgtgggatatgattctgtctatcctgtacggatatacagtaattaccgggaggggattccatggcgaagaagcaggcggcaccggcagcacggcaggaaatgagcggtatggcgcgcctcgggcttcgcgtctcatcgatgattaatcacccggtcgcccagacgcagcgctgggttacgattcatcgcctggacacggatggggatcgggagtgggaagaggttctgagcgtgatcgctgataccgacgagctcgagctgacgctcaatgacgatggcagtgtgacggtgaggtgggagca

SEQ ID NO: 140 - DNA, 640 bp, Homo sapiens
  misc_feature 557, 559, 591, 599: n = A,T,C or G
acattggtggcacttgaactgagtgcaaaccacaacattcttcagattgtggatgtgtgtcatgacgtagaaaaggatgaaaaacttattcgtctaatggaagagatcatgagtgagaaggagaataaaaccattgtttttgtggaaaccaaaagaagatgtgatgagcttaccagaaaaatgaggagagatgggtggcctgccatgggtatccatggtgacaagagtcaacaagagcgtgactgggttctaaatgaattcaaacatggaaaagctcctattctgattgctacagatgtggcctccagagggctaggttagtacaaactcgcattcatggcttggtttcccagaagatctccatttaacttttttaaagaaagtttattgctttctttaacctgcattttttctaagttttttttcgcataaaggtgctgtctttgtggcaaggcctaggcatgacaatcggaggactcgagggggatggaggactagtgatccggctggctgcttccagtcgattagagaggtgaaaaagctgaacgtgtgcccantnaatcttcaaaaaggcagaaacatatcaccttntgcccccntaaacttgttctttttccgaaggggaaaaaaaaaatggaaa

SEQ ID NO: 141 - DNA, 127 bp, Homo sapiens
aaaaatcacacactgacaacacagaaatacgaaatgctaggaaaagtctagcatatgaaggaaaaacatgtcttatgcactctaatataattttttcaattagtataaaggcaaatgcggttttttt

SEQ ID NO: 142 - DNA, 126 bp, Homo sapiens
  misc_feature 18, 44, 46: n = A,T,C or G
aaatatcctctggatgcnttcaagtaatactaatcatttcatgngnaaaagtcttttaataaacaaattcagagtaaaattaattgaaatatttataatacatttgttacacagttatttccaata

SEQ ID NO: 143 - DNA, 730 bp, Homo sapiens
  misc_feature 512, 555, 603, 608, 685, 721: n = A,T,C or G
gcaagttctggagtgttcacttctgagcctgaattccctcccctgcaaaatgggggaataccctcctcagagggtccctgcgagggtgaggggagatcagcatggcaggtgtgctgggcacggcagggcctgggaagggcagatcctttccccatccctgccacaaacaacccaaacctttaaaggagagcaatggccttgtgtcaaaaacaaaaacaaaacaaaaccctgtcctaggagactggggccctaatttctaatagcaagcctttatgagtccctaacactctactgggctgagtatctcacacgccagaggataacctgccttctgctcaccaccaccccgtagtagttgtcattgtgtccatttcacagatgaggcaaaggctcagaagagtcatgtgttaaaccagcttctagagcccatgcaggagctgcaggtggggagaatcacctctaggtgctcttcccatggaatcctcaccctccttgagtggtcactcactcanctttccaatgggtgtgtgacctttgaccagctttctttccttntctgggcctcagtttcccaccttggacaaagtaagaggtctcttgggnttcanggtagttcttcctaacttcttttccttttcatttgagcatccttcttcattttttgccacctctcttgtcattacangcttttaccttcggccgcgaaccacgcttaagggcnaaatttcca

SEQ ID NO: 144 - DNA, 485 bp, Homo sapiens
ctggtcagaaatgattctcttgtgacaccatcgccacaacaggctcgggtctgtcctccccatatgttacctgaagatggagctacctttcctctgtgtggcattttgtcgcttatccagtcttctactcgtagggcataccagcagatcttggatgtgctggatgaaaatcacctgtgttgcgtggtgggtctgctgccgccacttctaatcctcatcatgacaacgtcaggtatggcatttcaaatatagatacaaccattgaaggaacgtcagatgacctgactgttgtagatgcagcttcactaagacgacagataatcaaactaaatagacgtctgcaacttctggaagaggagaacaaagaacgtgctaaaagagaaatggtcatgtattcaattactgtagctttctggctgcttaatagctggctctggtttcgccgctagaggtaacatcagccctcaaaaatattgtctcaacag

SEQ ID NO: 145 - DNA, 465 bp, Homo sapiens
ccaagacagctcgtttctggagagtatgagggtgtgttttcttattgtgaaaggaactaccttctcttagagggtaggaagaatgtggtgtgtgtgtgtctcataaagcaaccggacattataggtgcccaggtcatctataaaaacgatccttgggctgtgtaaaaatgaagtggcttttcagtatcctctttcacacttgctgcttcgggagactatgcaatgatgggaaggtgattgcccctttatttcattcagtgccatggtccctgttgttgtagtaatttatttgtttagttcattttttttttcttaacagtcaaggggaagagtgattcctcacactgctttcaagctggactgagccagtctcattctgggaaagaaatgctgtgtccagaactcagcagctccatctattttttccagtcgaaagaaactgatctttaggcagtttttacttgg

SEQ ID NO: 146 - DNA, 351 bp, Homo sapiens
ccagccggggtaatctgtatgtggcggacttgagctacgacgtgggcggcaagtgcctgtttgaccagatcagcggcgtgaagcttatgccaactcatcgtttgataaatccgaggatcagttcaagacgtcgcagcgggtgattttgggaacgtcgttttcggtcagtaaattgtgggtagcgacggagtggttgatcggcaagaatgatccgtatattggcgggagcagctataccgagagcctgggggctggggggagtaaccagtgggagaatcagttatatatgaacattgggtactacttctgacttaagatctccagcgttttaactggccttatcgcaggcaa

SEQ ID NO: 147 - DNA, 654 bp, Homo sapiens
acttatttttaattactgaatatttcttagacgttttgggacagattttatgtaatctttataagtatgatttctgaagaaaagcaaatgcattagtatgtttgccttaaacttgtagactaaaccaagtattgtaaaataaacagcgataacagtgatagtttttaactctatggtcattgtatcactctggaaaatgtggagtagctgtaataaatctactcctgtattatgctttacagtgcaggtcttagtttttcttttttctcatttcttttgaaatggcatctcgaacaaagtccaccaatccctttacaaaagaatgaactgctcctctgtgtgtacttcatagaaggtggaatcggacagaggcaggttagtgacagttattcctgaaatacaggagcagagtacagtctgttgtggtttcccggattccgcgcctagctcagccaattaagcatgagacataggccattgagccacttagtagttatgcgagtggatagattggtatgtaagagggaaagaggtctgctgtaaagaacaacacttgtttgtctgtggggaaagaaaagcagaatcttgagatgaaagttggcatacaaataggatactatcgccagtaggttatattacaaaacatttatcggg

SEQ ID NO: 148 - DNA, 539 bp, Homo sapiens
tgaatatcatgagggtgattttcacctgattgcaaaactgccatagtttgaaacactttttcaatttaccagacacactctgtcaagacttcatatacttccaacttgcaagcctgtgttttgccttctccaacctaaaaaggaaaagctttaaacgatgaacttacattctattaaaccatcagacttgagcttatccatctgtttagcgtgaatgtacaaaccaggtacatttccaccaaacacatagaaaaatcttgtgcatcacagttcagctaagggtagtaggacaatccttacaatcctccttggatttcttttttaagatgtcaaagaagcaggtaagcaacattgttcatttgttactgggtgttctagatcaaaccttcacaagctatatatatagcttcatatgctatagcttacaaatggggtaacaaagtaaaagaaaagaacaaattatactttgacactttatagtcaaagtataattaaaaaagaaatcctacagtgggtaatggagaaatagataatttttc

SEQ ID NO: 149 - DNA, 273 bp, Homo sapiens
tttttggtcattctcctcaaggagccgctggatagtagtcttgattgacttccaccttgcccctcatacagtccggtactaaggccaccgacatcccgaggaacctccggaaccacgaccgccaagcaactcgacccacgataggtggggcctacgctctcgaagttgattggatgctcccgcctacagggcggggtacagaagggacgtcatttgtgactggacgcgcaagagctatactcagcagctttcctctgtcccagcccctagaac

SEQ ID NO: 150 - DNA, 200 bp, Homo sapiens
gtttttactaccgtatggcccatttaaaagggatgtgtacgccttacactataacccttaaaccacctagaaatatgaaactcaaactgccactgacctccctcaccaagctccataaaagtaaaaaattataacaaaccttattaaccaaactgaacgaacatatgggcgattgattcattgcccccacaatcctaggg

SEQ ID NO: 151 - DNA, 515 bp, Homo sapiens
ctgtagcgatctttaagaatattttatatatgaaatctggatttagggttcccatggtctggcaccactgggtacagtagttctacatggcagtaattcattggagttgaagcagtgaggaaagagtcaagtactagtcttttatcctcagtgtccagtgactgtcaagagaaatgggactgccttctgcattgggatatgtgggttaaagagtagtccaatatagaagagtgagaaagtgmaccctctgaggcatagtaatgttttattkraaaacatctcacatgtattgaatacttasataggatgtattctgtattactgaattttccagattattgaagcaatcacctttctgtgtttaaagttttagaaagaatgcttttaaaaatgcttaacataagataagcctgttttcatggtgcaaggtcctttctatgaacatgaatcactggactctgagggttggactaagatcacatctacatcccttttaaatgactagtgtgctcaga

SEQ ID NO: 152 - DNA, 243 bp, Homo sapiens
atttcaacaacatacttgtcgaggtagttataaatcttcttagggggaggtggtggtttctgttggaatgccaattttacagcttctgctgctgattcaggttctttaattatgcttttctttgagtctgcttcagatagcacaacaaaaaaatgatgacacttttcacacttgacaaaacgggtggatgatacaaaaggtctctacatgtgtgcacaagtcgccacatttaggacagcgcag

SEQ ID NO: 153 - DNA, 620 bp, Homo sapiens
ttgtcttctctaccttaccatagccagttgctttcattttaaaccagagcaagtaacatattagtgacttgaatcttcataagttaaagtaaaaaacagcaaaaaacctagatctttgtcttttagaacacagaccattttcaggaaagcagttagctaagtgtttaattcatgaatattgtatactgcatcccctaccacaatttacacaatcctgtggatagtcctacctcaccctggtcaacctacatgatccttaagctaatggcggatcacgatgaccttgtagacatgcacacaactatacctttgtccaacagatcataatatatctgctatccaactggttttacctgcctaatcctactgatttgggcactgcttgtatagtctctcaagttcacaggaaatgttgattttctaaggtcctcatttttacagagtatacaggcaaagtgacaggggaaaaggaattagtctaagagtaaggggatgattattatattgaggctaaaaccacaaagtggctcaggctttaaaaaaaaacactgtggataatgacaaaaagcataagtaaaaatattttgagaaaaataaagtacaagttttgaacacccccc

SEQ ID NO: 154 - DNA, 843 bp, Homo sapiens
cattgttagtgacccaagtaaatttatagtttttaagttcagaggaaaaataaagcctattttttgttaacagtcttaataaataataaaatggaataaagaaaccaaaaaaaaaagaaaaagtttgtatgaaaattcatccctatttctttattttggactaagtagtcaaatttctactatattaatattatgtaagcgacacccatttaaattcactctctttgatagaaaggtgagttgattatcacacctgctattttttcactgccaaaragactgcaataacctccctccatcaccctcaaaaaacaaacagaaaccatctgaggcatagccattgtttacatattgtgtttgtgtgcacctatctacaacgttctttcttctaaggagtttatctgccaatattttcggcttcagcagcagcgctcttcttgacagactaagagaaggatctacagaaaagtcatctgattaaggttttgggtcaaattaaaactctctggacagaatcctctttccttcacttggatttctgcaaacagaaagcagattattctcctggcacaatagcgactctagaaacgcttatgtttttcagactttggcagaacttgttaagaacagcatcatcataatacatttgtacaaactcgaatttcagtggctcttttgtcccacatgatgcatgatgaaatttataaaggtctgttttacccccacagggtcatttcttttgtgttcctacagagccaataggcttcatttaagtccaagttattatattaaccatccctttcactagactagagaacttctttttcatggtccatatcgtga

SEQ ID NO: 155 - DNA, 674 bp, Homo sapiens
tttcgtgtcagccccaggtttgctccagctattcacaagcagaatataacacaagaaaaacaattcatatcccttagggaaaaaagaggatcaattcatcactcaatatttaatacagccaaaatgagctgccaaaacaagcacacacacaaatactgtgaacagaaaaatacaagaaaatgactaagctgggagtcttgacggggtatggacattgcttaaagcacttatcagtccccagaaaaaccaaaccaaaaacattttttacgatggcatggcctcatggccccctttaaaactgttgatggtaacaaagggcagggggtggggagagaaaacacaatcactgctccctttttgctcgccagtgtgactgcacccctcacggcaccggcatgtacacaactaccacacaaggaggaccaagtccctctgctggtggcctcctaaaaggcaaggcttgagttttggctgatgagcaagttctctccgttaccaatccctgccaaccagcactaccatggctgaattgatctaccgttttcctgagtaaactgtaactggctacagtttcggtaacatggaaaagaactcagctactacagccaactgcaatacttcaggaaccccctccatccctggggctcctcactcctagtgcatcttgattggat

SEQ ID NO: 156 - DNA, 671 bp, Homo sapiens
cctttagtgaacacctttatctccatgtccctcttagagcccagagagctgcccataggcattttccagaattcctcatgtcacctagttcaatttccattaactcagatcagccattgtgattcaccatttgtcaggctctcaggtttaacaaaacctactatcaccatcatccttcaacagccacagtctgaattgagccaacatttttttttctttgagaaagaagtgggctggggcacaacttttagtctgaggggagctagtagtcggcttgacaattaaagccatccataacaacttttcctcaaatgtgttgactcctcaggggctaaactgctcttagcttagaattatgctttactagagatctaccatataagtgggttaatcactaccatcctgtaactagttatatagcttccagacatgagggagacatcaaacagggatggaagcaaccccaaggatatgcaagaagggcatgatgaacccccttccctctggcaggagaacaaggccaaccaagggacagactggaaagcacttagatgtttaaggaggagaaaggggaagctttgaccagtccttgccttttgccaagttcagccagttctccgctgcttgcaacctctagcgcagtaacattttgcagaattgcagattttccc

SEQ ID NO: 157 - DNA, 474 bp, Homo sapiens
cgcgttctttaattctttaagcctagaaagtcctttacactacttacctaaaggtcccaaagtaaaacacacactagtagtaaggctagtgcatttcccttctagcactcaaagaaagcttaacatttttgacagtttgcaaataccgccttgtatttctgattcagccttattcaaagtatcataataaaatatttattaaatstatgttgatctgcgtgcatttatgatctccagattaacgttaggcttctctgttgggccctaacttggaggtgcttttttggatccctcctcccgtgattcattgtaatttcatttcccttgtcatggctctgaccagagaagattctaaatatctgcccccaaagccaaaattatatcttttgaaaagtgaaatgaagagttgagtcastaatttattttagatattactgcctaaaacaattccccaaaatttatggaagttggagg

SEQ ID NO: 158 - DNA, 584 bp, Homo sapiens
ttggattctgcagttccacatcattcactccggcaaaggagagaacttgtaacaaagatgagtgccaagtttagtcaatttaccctacctggaatactatatacaactctgggtctcatgtgtgttaaaatacatacagtgaagctgaggaagagccactgaagtaaaaagtattgtttacaagttggaaaggatgtaaaaataatctaaagtatactaagtcaggaataaaaggcagagttaataaaattgtggctggtactgatagacgaaacagatatattttctaaatcctggaataattattaaaaaattttacatgtatcaatggattccagactccatattttaagtttcacaactactgtcatttaaaactataccttattgaacgtctcccactctcaataaattaccccaaatcactcttctccaaaacgtaaatttggaacacactgacttacaaattttgggcttaatttataggatgttgtggccctcaaaaatatcattgtgggctaaacaaaataaattcttgaaacaattctaaaaatcaatcattgtccaaaatgaactttttctaa

SEQ ID NO: 159 - DNA, 671 bp, Homo sapiens
cctaattttattacttttcttgccactgctattattgatagaaatacaattaaataattaagatgaaccaatccattggaagattactaaaattgtatcttcccaatgcctcctacagtaagatttctttataattataacccttggagacaatttgaactttatttaaatgttctgctcaaatctaaatttccttctcctaggctgaagcctgatctaaataaggaagtagttgggatatatccacaggctgtcgaacatggagctgcatctgagagacaggtggcagcaaccaaaagcaaagcagggactgagaacaggcaggttccaagagcaaaatggaacttgaaagccaagtatggttcactgtaaaggagaaaatatagaaatacggaactagaacacctggtctgggatgtggtaagcacccaaaatataggaaaactgtatgaattcttgtgaagcagtaaactatgatagtaatcatgtgacacatatgataacaaactcaaaacagggaaaagaggggctttattcaatgctggagataagtgaaaaaaaaagtgaagtgtctcaaggacagaagttatcatctcaaaaaggcatatcagctagatctcgcggaaaccatatgattatcataattctagactctgttcggtattacaaag

SEQ ID NO: 160 - DNA, 315 bp, Homo sapiens
ccagagagggagggctctgcttcaccacagggcaccagaagaggactggtgcgcgggaagaccaggtaatcataatgctattaaaaatagcagtaatcatactgttttatacattgtataatgtcataaggattttaactttcatgtaacataattgctgtaaaagtttccccagtttgttttgtgctatttaccctggtgttaaaatgtgtaagaatttacattttaggtatgttaggtttattcctttttatatggtttctgtttgaaattttgattttagaagacattcattctcaaggtcataaaacacac

SEQ ID NO: 161 - DNA, 607 bp, Homo sapiens
tttytgtgtcaccttggataattgcttaacttttaaaatttacgttccctcatttccaaaaagggattataactcactgttattttgataattgagataaatgtacgtacaagtgctttgaaactgtaaagtgcattataaacagagggatttaccatagaggttctaccttgatgtatcaagagaagccttttctggaatctggtgcagccttgtgagatgctgttaggtaaggggactccttggtagaatttcttacatttgtgtaaaaagttctggttcctgagtaattccaaagaagatgctatgaggagttcactgtgcctttgatttgatcccaatgggtcagaatatgttttctcattcagtaggctactacaggatttgaagtagaaaaaacagggtccagtgaccttcacgggatcctagatgttcatgaatttcaatcatttgagattgtggggtgtggtccaatgctgctctcaaaaagatgttgcctttcttcasagagcattaataactaaaaaatcccctggtcccaaatttattgtgtgtmtctgaaggctttaactgaagaaatgaaawgcacactcatggaacaaactaa

SEQ ID NO: 162 - DNA, 443 bp, Homo sapiens
tgagttttgaaaaagtgaataatcaaaaggaaaataattccttgttgttcataaattaagcatcactaaagtctcttgaaaggcatttctgtattgggcaagatttaaaatactaaagccttaggtcctattcatatttaaagtagcatgtttgtaacctgttactatttggagagagaagcagttgcctgccacaattgaagactacctttcaaatagcaaaagagagagagaaggctgatatttcgggcttttaaataaagatttgtgtggttctgcttttactgtaactgtcactttcccagtgaaaatgatttcatatacatttgagggtcttacasgtatgggtaaagttctataaattgcaacaaaatgatacccaatttcattttatcctttttgtattgtgaaactggaaactttatgacattgtaaattatcag

SEQ ID NO: 163 - DNA, 686 bp, Homo sapiens
caggcaaattatagtcaaatacatcacccccctcaggcatctgtggcaaggcatccctctagagaacaactaattgattacttgatgctgaaagtggcccaccagcctccatatacacagccccattgttctcctagacaaggccatgaactggcaaaacaagagattcgagtgagggttgaaaaggatcccagaacttggatttagcatatcaggtggtgtcgggggtagaggaaacccattcagacctgatgatgatgtaagttagctttgtatattcttgaaacacctataaagttttatttaccgattgaatacttaaatgtaagtgaaaatctaatagatgtttatgtaaatctaggtagacatcacctggattccccactctattgcttacctttttgttttgtaatttgatcagttcaagttaaaacaatttaaccaaaaactatgaatgtttatgatataatgaaatgattgttaactttcttattgctttttcacacacctataaaagtaattttattactcccaagagaaatcactaaaggcagaattactagaggtaaaaataactagggttggtacagtattactcaggagaagtcaaggggagaaaacttgtcccaatgattcaaaataattttggcatggggggggggagggaaaaaaatttggcttccttt

SEQ ID NO: 164 - DNA, 706 bp, Homo sapiens
ttttttttgtttcatttgctgcttaaaataaaaattataaattagatttaaatggagcactaattataaaacagattgcaagtaccaccatttgaaaaaaaaaaaaaaaatcagtggatttccataacacagaaaatgcatggacatgcatctacagtagagttaaaaatttcctgtgactaaaaaattaaaaactggaatcaccagtagcaaatgtatagtcaatggctatgacaagaacagatcctgccgagctcataaatgcaattattggcttttttgctttataaaaaagacattacatattttattgcattattctcctaataaaaaacatactaccacgtagctctccccatccccattctttgcttccagatttttatagaaaataactgttttagtctggccttggaaagtgaacccaccagcaccaccttcacctactcactcttcaattcaatatgcacatagcaaaagccaacacttcaaatctcttgcccacatcaaaaaaagtagtttcaggagaaaaacattaataccagttgaataaaaataagggcataaaagctatgagagagatagctctgccatctgtctctgggctaaaaatcaaggctaactattgcctttggcaccacaaggttcaaggtccatggttttattagaaaagtccccacaaaaaaattaaacccccctcacccca

SEQ ID NO: 165 - DNA, 427 bp, Homo sapiens
tyywgggcaattaggcaggagaaggaaataaagggtattcaattaggaaaagaggaagtcaaattgtccctgtttgcagacgacatgattgtatatctagaaaaccccattgtctcagcccaaaatctccttaagctgataagcaacttcagcaamgtctcaggatacaaaatcaatgtacaaaaatcacaagcattcttatacaccaataacagacaaacagagagccaaaatcatgagtgaactcccattcacaactgcttcaaagagaataaaatacctaggaatccaacttacaagggatgtgaaggacctcttcaaggagaactacaaaccactgctcaaggaaataaaagaggatacaaacaaatggaagaacattccatgctcatgggtaggaagaatcaatatggtgaaaatggaaaaa

SEQ ID NO: 166 - DNA, 124 bp, Homo sapiens
accatgttttcgttgtgtgtgagcagggaagggaactttcctgccttatttaaacctgggccgaggattcgtggaatctgcttgatcagagactctgaggccaaaaacgcatcatacttcttgg

SEQ ID NO: 167 - DNA, 232 bp, Homo sapiens
tctgcatagcaaatatgatttaagaatttaacatcattatttgatcacaagcgtaaatatgtcaccataaataaatgtaaattcattgtacaaaaattcccaacaactcttaatacaaatatggtacatttgacagtttctgaaacagattatttttaaaactttttaaaacctaagctttatttttttcctggttattagacacacacaaaaaaaataaaaagaggctggg

SEQ ID NO: 168 - DNA, 677 bp, Homo sapiens
tttcacaattaaccaacatgcaaaaattctcagactaaacactgagaaattcttcatacaatgcatttgccaccttattgcatttttaaaatctttattctatagtgaattggtattcccaatctgcctaagcaaaggcatgcccttctaacaagatttgcttagagcagaggtgatagaaggaagaatccgaagaccctctggcatggcaatctgggagcagcacattgttgatggagtccaagtgagcacatttcacacaattcatttagtgacaagtgggcttgctcccttttcatccaggaaaaaaactactcacagaccactgcccagaatctggaataagaaccctcattttaaggtattcttcccaacaaataaatatctaaatattgaaagggggcatatcagaaaacttaaaagacacaataaccaaaaccaaaaccctcttcaaaacaagtaagcaatgtctgtatttagttcactctaaaacattcttagcttttcttgcagtttgttcctaaaagatttgattgggcacaagaggaacgaaattattaataaaataaaagcttatttttgtttttgctgtggataatcggtacaaaacgtttccagatctgagacttaaatggatcttttaaggtgaaaaggagaatgccaggttctactgaaat

SEQ ID NO: 169 - DNA, 635 bp, Homo sapiens
ttaagaagactgggcatttatactctctcttgctagtcagcctggagcaagcttggagcagacgcacatttttgtactggcacatattcttagacgaccaattatagtttatggagtaaaatattacaagagtttccggggagaaactttaggatatactcggtttcaaggtgtttatctgcctttgttgtgggaacagagtttttgttggaaaagtccgattgctctgggttatacgaggggccacttctctgctttggttgccatggaaaatgatggctatggcaaccgaggtgctggtgctaatctcaataccgatgatgatgtcaccatcacatttttgcctctggttgacagtgaaaggaagctactccatgtgcacttcctttctgctcaggagctaggtaatgaggaacagcaagaaaaactgctcagggagtggctggactgctgtgtgacggaggggggagttctggttgccatgcagaaagagttctcggcgggcgaaatcaccccctggtcactcacatggtacaaaaatggctttgacccgctaccgacagatccggccgggtacatccctgtctgatggagaggaagatgaggatgatgaagatgaatgaaaaaaaaaaaaa

SEQ ID NO: 170 - DNA, 533 bp, Homo sapiens
ctgtgatctcacaagtgtgaaaaatcttatgaatgtaaaatgtgtggagattcttctttgtttttagcttccactttgggaacatgtcaaagcacacattgagaagtcccatgagtgaaagagatgttggaaagcccttgaacttggtcgttaggaaacatccacactgaagaggaacctgactgtatggaaggtcaaaaaggctgtattaatttacatgcaaaaagtcacactagaggaatgccatatcagaatgcttttggtaaatatacatgttttaaagaggttatatatcattaataaaaatatctagctggtctgaagaccctgagttatctcaattgttcacggttacagatggaactctttattattgaggagttccactctttcccccatttgtcactactacacttccctagtctttaaaacaattttaggctgggtgcagtggctcattcctgtaatcccagcactttgaaaggccgaagcgagtggatcatttgaggtcaggagttcgagaccagcctgga

SEQ ID NO: 171 - DNA, 568 bp, Homo sapiens
cccttgscaaactttcccttaagtattgcactacaagtctaagacacttttcactcaaagttccttccttccttacctctcttttaacttggagtcagactttcatcagtctgacaacttctccctgtctccttccttttccccccttcacaagcatttcacctaacaaatttcttatgtgcttaatcccctcttagaagcagatgccaagatgggattaagcacataagaggtcctggactaatacaatgacaaaggctccccttgaagcatcacactaaaaggaaaaaaaaaaaaaaaacctagccattttacattaactatttctaaaatatagtatttgcttccctatttgctaaaacaaaatatactaaacatgactattccaaaaatctgtagggtactaagaatatgaagagattcactctacttcaggggatggagttgtagtagaaaaggctttgtggagggagggtggtgtttgaaatgtactttaaaagccatcctcaaagcctcgagggctatacctggcctggtgattatccaaggacagtccattcaaacaggg

SEQ ID NO: 172 - DNA, 167 bp, Homo sapiens
ccatttacaggaatcagccacttcagttcagacagctttattaaaccgcctggagcgaattttcgaagcatgttttccttccatacttgtccctgatgctgaagaggaagttacttccctgaggcacttgctggaaacaagcactttgccaataaaaacgagagagg

SEQ ID NO: 173 - DNA, 391 bp, Homo sapiens
cctcccaaagtgctgggattacaggcatgamccmccmcgccctgatgatagacacgtttttaacttctaaaaatatatgatcatgattgtgtctgtggagacttgcacatatactaaattttaamcaattagagatatttgttcattaccacattttgggagtcattatttcctctatgaagagagaaaggaatttgatacaagttcacaggggcttccagtagattgagacttttatttctagctgagctgctgatgtatgaattttttttgktattatgactttcatatgtattaaaaataaaatgaaaaaacaagggattaggtgaggaacctatacgtctctaatatgcaaaataccacagaaataatgactgktgggaaaattagg

SEQ ID NO: 174 - DNA, 474 bp, Homo sapiens
gaactcagagagaggattgtcacccttggcatctgagctgacactataaggacaatgaggagtctccttggggatagatggggagatggaaggacgatgcctgtcctacggggtcttggaaggttagggatacacactgtgagctgccacaggctcaacagtacggatagggggtgctggaaccagccagggctctgatcaccaagctatgtgccccatgcagaggaaggggtagtggcacactgaaccacccagccacaaggctatctccccatacagggcacctttaaaaaaattatccttacaggggaagacggggaggaaggatgaactgtgtgcggtgatgttgcagtgagtgtgagtttgtgtccgtccgcttgtatgagggcctaccttttactaactagcccccaactttcattatctcccctttttctgtctacccttctgcctttttaaagtggcttgcaatcc

SEQ ID NO: 175 - DNA, 655 bp, Homo sapiens
ccttgcaggggtggggatgtgtgggcttgttcactgttacagcccatgtatacctgaagggcaacatgtacccacaaatgttccaggaggtaaataaaaaatacaattcagcctcttctaaaccatccttgttgatatctctgctacttccgaaagttaattcgttatttggactccataatttttcctattaattcaccctatgtccaactccaacagtgaaaaaaatttatttaatctttgcaataagcctataggcaggcagcattatcctcagtctgcagataagctaaggctcagagaagcttgtatactgtcacttaggtagtaattgcaagagctggcattcagacccagactgtgggactcctcactccattctctttccccccactaggctgctccttaaaatacaatggatgcttgatgaacgcttgtgggaatcctgggtggacacagttccttttcggccaaaagcaccttgacgacttgtgaagaattaatctggaaaacttaacctatttataaaaacgtgttattaagggcaggttattcccaccccctttaccaaagaaacccgccctgacctttttttactgggggttggtcttgggcattttcaacaaggggggaacagtttaaaaattcccccctt

SEQ ID NO: 176 - DNA, 660 bp, Homo sapiens
cctggtcaaagtgggcattaccattcaagcattactagacatcaccgtaacgaaggctctgttcacatgaaactaccccttctccattgggggctcagactctgctctcatccaggatcctgaactctgctccaggcacctgttcaaccctctctcccacccactgcctgtcacttcactgactccagttacattgaaacaattttcagtctaagggaggattttctacctttcagagctgacctccgactttaagacttgacaggtatttatcttgaaaccagagagggagctggaggaaaaaaaaactgagcaagcacatcaatgccttttccacccttcttcatcctttccacactcaccgactgccattaccaaaacgccaagcacaaccggtttggaacaagacgcattccgttttaattaaaaccaactcattatgtattttagtgggggggaaggggggcacaatcagggttttcaccaccaaattttccacacggtttctgaacaccattgccttttaaaaaactatttttccacctccaaaatatttatttaaattttatttattacggaggtggtattcttcctttgggagccaaattgggaaatttagggaaccttttttattacccggttttttgggcgggtaaaccc

SEQ ID NO: 177 - DNA, 459 bp, Homo sapiens
ctttttctcttcctctgtggaatggtgaaagagagatgccgtgktttgaagagtaagatgatgaaatgawtttttaattcaagaamcattcagaamcataggaattaaaacttagagaaatgatctaatttccctgttcacacaaactttactctttaatctgatgattggatattttattttagtgaaacatcatcttgttagctaactttaaaaaatggatgtagaatgattaaaggttggtatgatttttttttaatgtatcagyttgaacctagaatattgaattaaaatgctgkctcagtattttaaaagcaaaaaagggaatggaggaaaattgcatcttagaccatttttatatgcagtgtacaatttgctgggctagaaatgagataaagattatttatttttgktcatgycttgkacttttctattaaaatcattttacgaaaaaaaaaa

SEQ ID NO: 178 - DNA, 720 bp, Homo sapiens
ctgcaagctcccactccttccatttatcttaacgcccaggctgacttctaagctgcttttcactttcctacctccactgcattttcgcccctgataatttttgtaagcttacctaagcctcccttcttttgagatccccttcttaaaagggtccattctattaaccctaccccatatccagttacttttactacctgctgatctatcgctaccttgtccaattcatgggaattacagggtgcactgggacaagagtaaaatgatccaacaaacataatgttgcatttaaaaaaataagctaaaagatactgatgactttttataactacaacatattcgtttgtgaataagaacatatatagtaaaaagatgaaaatgtgaacaggttgactatttcctaaatttatggcagaaggttgttctggagaggatgggaagaaaaaatgaaggctggcagtgatgggtggggaaatgcaacctccaaaattatctatctatatatttttattaaaaacacccacagtaattatggcaaatgttaatggtttgtttgttctaaggttttggatacatttaagatctcttgctttctgggtaccatttcttttcttttcttttctttttttttcaaattaattccaaaagacttatatctgctacatgaagaacgaagcaagttcagctctcttggctgaaatgttcaaatgcttgagggcaagg

SEQ ID NO: 179 - DNA, 427 bp, Homo sapiens
ctgtgaatctgtctggttctgaacttattttttagttattggcaatctttgtattactatttcaatctcttcctggtttaatctaggagggttgtatatttccaggaatttatccatctcttgtaagttttctagtttatgcacataaacgtgttcatagtagccttgaataatcttttgtatttctgtgatatcagttgtaatatctcccatttcatttctaattgagcttatttgaaacttctctcttcttggttaatcttgctaatggtctatcagttttatttatcttttcaaagaaccagctttttgtttcatttatcttttgtattgtttttgtttgtctcaatttcatttagttctgctctgatcttcgttatttcttttcttctcctgggtttgggtttagattgttcttggtttctct

SEQ ID NO: 180 - DNA, 728 bp, Homo sapiens
caaacacaaaagtcactgtgtgtgtgatgcttctccaattccactcatcctggctgccattcatgcactagtgcatgtatgcatttttacattttttaaattacaaaaatcaacctattataactgcttagatatatatgaagtaaaaatgaaagttctccctttacatgacccatcccccatcatttccctctttatcttatactgtcagcattcccagcttgtagcacagtgtctggcaatagtaaatcctcaaaaaatgatcaatgaataatttaataatgattaataaataaattaatgatgatggtgaagataaattttagcatttattgaacgctaactacaaaccagggagtgtggtaaatattttataaaaatcaatgaatgagctaaaatgccattctattatttttttggatacggtttaatattttactcataaatatgcttaaagaatattataattatatgacttagaatggtaaaacaatatgtacagcagtatcctattttttagaataaaaatataaatatgtgctcacatatgtggttggggcatgcctagaaacccgattagaacgggattttttcttaccaccattttttttacctgggaaaaatatgggaaaattttatttcccttctttttggttctaaaatttatatacaggagcctatttggctttggataaatcattttaaaaaaggtggtttaaaaaaaaaaa

SEQ ID NO: 181 - DNA, 546 bp, Homo sapiens
acaatcctttggaagacactactgggctttgggtgctgctttttaataattgagttattttgagcttgccaagtaggatctattgcctggactaaaatttatttcctaatcttctgatgaccaagaaaggaaaaattaagtttgcagatgggagatgaaatatagccagcgaatatgcatactggttctgaatgaaaggaattaacttttcagtcaagaaacagtctgcatgccgtaaattgaatttttcctgcaactggaatgattggttaattctttttgaacactggcctttctccccaagaacactaatgaattgctaatattttttaaagaaaactggttttttaattaggtaagctccacttcctcttattttttaatccctaaagaaaactgttaaaagggaatggatctatcacgccttttcttttaaaaccacctttttaaaaaaggatttttccaacccccaatttgctcttattttaaaattttgaacgccaaaagaagggaaataaaaatttttcccttaattttaccccctta

SEQ ID NO: 182 - DNA, 333 bp, Homo sapiens
ggccactctgactgggtctgctaattcacatgctctttgtgacatacggctctaagaggcagaggctggaagagaagtatgtgggttgtgggatcaagatacccaagtttcagtcttgacactgctattacttagtcaggtgaccactgtaacttcatcttgattgagcctcagatgtctcacctgcaaaatggagtttgaaatttgctatggttgggtgtcacacggattaaatgaaataatgcctgttaagcgcctatccagcacttaataagatggccactgcatcataatgctttgggcacaagtaacacaacatccaacccaaagggg

SEQ ID NO: 183 - DNA, 393 bp, Homo sapiens
ctgaatttcttgggctttatgtggcagtgtggtaaaaatatatgatcagatttcactgttaagaaaattctttcagcaatacatgtagagtcaagtttcttgcatggataactgaacatgtgggttatgagattttaaaaaatgtctcgtgacaaactttacggaaatgcaacaatctggacatctagttttgtctgagagtggcgtggatatgaagaactgtgctgttggtgctgatgccacactaagttttggcagtcacactcttggttcttcatatttgaggagatgggatggtgaggaggcctgttggctttattttattacgtgccaccatctagaatacagattcttggatatttcatcttcacaaaggtgaagctgcaaactcag

SEQ ID NO: 184 - DNA, 700 bp, Homo sapiens
  misc_feature 74, 503, 629, 656: n = A,T,C or G
ccaggscawtgaggaaaagrgaaagaatwtarrggstwttcaaataggaaaaraggaagtccaaattggtcccntgttkgccagataaccatgattgkgkatttagaaamccccatgwtytcagcccaaaatctccttaagctgattaagcamcttcagtaaaktctcaggataaaaaatcaatgtgcaaaawtcacaagcrttcctatmcgamcaatamcagmcaaacagagccaawtcatgagtgractcttattcacaattgctagtaagagaagaaaatmcctaggaatacaacttmcaagggatgtgaaggwtctcttcaaagaagaactacaarccrctgctcaaggaaataagagaggmcmcaagtaaatgggaaaagcattctatgctcatggataggaagaatcaatcccgtgaaaatggkgatactgcccaaaataatttatagattcaatgctatccccatcaagctaccattgactttcttcmcggaattnggaaaaatctactttacacttyatagggraccaaaaaagaagcccwtgtagccaagacaatcctaggcaaaaaagaccaamcctggaggcatcacagtmcytgacttcmaactatwctaccaaggnytmcrgkgmccaaaacagcacggkacntggtmccaaaccrgacwtwtwgaccmmcagacacagaacmgagg

SEQ ID NO: 185 - DNA, 192 bp, Homo sapiens
ccagyctttcttttaagtaagcgctttttcaagctcattgtagctacaaagtcaataaattggtctttgttatttttacctgaaaaggctgttaaaggttaaaatgacaaactcaaattcaaagggattggaggatttggtgtttatgatttctcagaacaacaatctagagaccaccagggtgggtttcag

SEQ ID NO: 186 - DNA, 688 bp, Homo sapiens
gtgctggaattcgcccttagcgtggtcgcggccgaggtgggatatttcttctggatagatttcagataggtagttccctcaaataagattatatgggtttgcattttcaaggcagagttgtatacttcctgctctttatttaaataaaaaaacttgaaaatctgttctgcccagtattgtaagcgctcaggtacaaatatgaatgaaacaatctctgcctaagtaacacaagtatagggacaagattctcagtaaaattctcacgtgaaatttgtaactcactagacactatcaggagatcaataattatgtaattaaaaaaaataattacctgccaaactgggttcttctttggcacttctgcttggttttaagacaattctcacatagaagcttattattccccattagtcattccatagatgtaaaactggtagaaacaggacttgaattgaacattctttacaagtaagttatatagcttctgaaaaaagggcttgaaaaagcatttttggggactataagaaccttcaaatgctttcccctcttaacaaaccttaaaattattttgaaaataatttaagggggctgattttctcttgtcaaaatcttgaaccccacttaccaggtggttggtcaaaccaaagttcaaaaaaaagcttctggcctttcctttatcccacttgca

SEQ ID NO: 187 - DNA, 779 bp, Homo sapiens
gcaaaaaacagatacattttcagtgtttaaaaatgaacaagtatggaaaggcttatacagtaactgaaaagtctcctttgggaagccaaggtgggaggattgcttgaggtcaggagttcaagaccagcccaagcaacatggcgagaccccatctctacaaaaaattaaaaaatcagccaggcatggcggacatacttgtagtagtaactacatgggaggctgaggcgggaggatcacttgagtccgagagtttgaggctgcagtgagccgcaacgcgccctgtactccagcctgggcaacagagcaagatgctgctctaaaagaaattttcttttaaagaaaaaagtctccctcatagcctgttctacaaaagtcctatttcttcccacaaaaagcctctggtacctggtgttagttcttggggtggaagattacttttaaaaatagaactattttttaagtatatcttttagggaactttagttcccgaagctttaggaaatgggatcttgaaaacaaaagggatttcaatacctatgacaatgcttaaagaattattggggcatttatttttcaatggagggtccacaaatctttggaaacccttggccaattaccagaagccactttaatttttgaccgaaaatgtttttaaaaattggcttttggaaaaactgtctctttccccaaaaatgaaaaccttgaaaaaaaggggaatttttaaggttgccccctcattaaattttaacccctctgaaagaaaaccctcttgtgacagg

SEQ ID NO: 188 - DNA, 394 bp, Homo sapiens
  misc_feature 307: n = A,T,C or G
ggcgamgtctggycaccatcatgccctttaatcaactcacacctgtttaaagagtgtttctgatttgaccttcatcccttagtttactggcgttaaaaaaagtctcagcaattttcattatttctcgtgggtctcattatcaaacctttacttatttcggcatatttcctctgggcttcttctagtttctgccttacaagcaatgctgttctgtaaatttattgaaacctctggaacatttcacctttagagatggaggatggaaggattggyaccagaagagggctaagatacgttytctgtcttngagctgaaagcacagyctactctccttcgttttgycgatgagaaaagttgaggccagaagggaggtgacatgtttagagtcacccag

SEQ ID NO: 189 - DNA, 681 bp, Homo sapiens
aagttctgactttggtctataaaacagggttattggctgtggctgcactcaatatctaaaaagttattaggaagtgcctcgttattgtcattaaagatatctaaatatggtagaccaaaggttgttgagaaacacatattatggactgagttctgtttcttctgctgtggcgcacctaagctcaagccttccttctctccctccccttctggccggcatggtatctgagctcacagacagacaaggcatgttagaatcatcagatcatgagcaccgtgctgggatttagccctctccaaagtcaattcttacagtccatactttgcttaaatcctcagttgttgaggtctgctctgctgtcagtaatcccagctataaatttcccccaaatgtggggcctagataaagtagaaggtggatggactcagcttattttcatgggatgacaggaactggaaagagaaagggcattgaaaataaaaagttattccagaatagcattaaccctcttactgttcaagaattaagaaagcctacttagaaatgagggccttgagaatgatacccaaatattggtctttctaccaaaaaatggcctttccaaatatctgctttcctgttccccaattggctttttaagtagaattaagttacctaaaactttacctgaagggtggtttt

SEQ ID NO: 190 - DNA, 839 bp, Homo sapiens
caaatacatgatttccattggcatagactcttctatagtctctcaggcacaccttatgactaataagaacactgtcttctagatataagccaagttttaggagttatctttgtagtttctgtgttgagactatgggtcttccctgtgcaaagacttgattagcaaatactatttgaaacgatcccaaattcatagtgcagttgaccacccttctgatcaaggggatctctgtatatcccatgaaagcttcataggtctcaccctagattaagtgcttcacttctcaagacagtgaacagatggaagacttttgtagttatcattatacaactgtgccctgtgtgttttattatacaaccagagaactgaggcactggctttacctgtcagctacgccaggggtgtgacgtcatctttctgacttgatcacacatgccacattgcttaatatttcaagcttagactgaaataatcctgtggtaaaaaatttttggggggctggggaggtaaagaacaagggggggaactttggaatatttttattcattaatcatatttcccgaattgtattttattttgaaatgaccataagggacttaaatacgtattgtggttaaattaaatggacccaaatggaggtaagtaaacctaatgggacaaatgaataaaaggtttatgactgggagcatttacccatgaacctccttagaagctatttaacctttcttttggaaagccctgaaggctgggaacttaaattttaaagacagtacctatttccagaatcgcttccaaatggccatgttttaaagggccaacattttgggatggccctgccc

SEQ ID NO: 191 - DNA, 697 bp, Homo sapiens
ccatcctgaatactgattttctaatggaactctattcaatggcgattgtaaaaccctgaggctccgttactattatggagcatactttcatctcattctcggctattgggcaatatgtatctcataagattttatcacatttcacagatgaactgttaattgattccatgggtacgattaggcgagatccaagctggagctgcagctctgagtcccataaattctttgtgcttctgtaaagaataaatctgtttttaatgcaaattaaaactactggcagggaattttggctcccagttattaaaagactggaaatgtgtaagtggagaaaggcaataactgcagtaatctcttaccggactctattataattccaaacatacataatggtgagaaaaaccgggaagggaagaatgtggcaatgtccactctttgccccaaacataacccttaatttccatggcgggcccaaacactggtaaaaaccaaaatggtaccctctatagcatgcaacttttatttcactccaaacgaaaaattattttgactatggcttgggaaatccattagtagaagaagttttataacctataggaacccggccatttcatttctaccaaatcacaggaattttagaatgggcaaggaatttacaggaagacttgcccaattatctttttttgggggactaaaccaa

SEQ ID NO: 192 - DNA, 687 bp, Homo sapiens
ctggttactatagctttgtagtataatttaaagtcaggtaatgtgattcttccagttttgttatttctgcttaggatagctttggctattctggatcgtttgtggttccatataaattttaggatagttttttgctatttctgtgaagagtgtcattggtactttgatagggattgcattgaatctgaagattgctttgggtagtatgaacattttaacaatattgattcttccgattaatgaacatggaatgtttttcctttatttggcgctctctttaatttccttcatcagtggtttataggtttcattatagagatctttccttcttttgggtaattcctacgtatttaatttatgtatcgctattgctaaatggaatgactttttaaatttctttttcacattgctcctggtggcatattaaaagctactgatggatggtgattttggattctgccactttactggaattggtggatcagttctaatcgttttcttatgcacccctttacggtttctacatgtaagaatatatcaccttcaaacacggataatttgacttcttccccatccaattgggaggccctttatatcttctcttggcctgaaggctctacttaaaacttcttatccctttgttggaataacagtggggacaaatggacatcccttgtcatggtccca

SEQ ID NO: 193 - DNA, 493 bp, Homo sapiens
ctgctaaaatgatgttgctaaagcattcctttttcttttgattaaacttcatgtttacaaaaaaattaattctagcagaataacgaatggttttgttttctagttctctgctgaatgaacagttttgccaattatcttcatagagtagtgatataatgaatgcaacctcaaatgcaaaccaaccaattcacagtccataccccaatcacttccttcatcagcctcaaaaatcgctaagtgaaccagtagaatggttttggagcagtaataggaaagcaaatagaaagtcaagggggactttcaacgccaacaagaccaattcagatcctgatctgactggtttctaatacaatctctttccagagtaatggagcatgagtctgccacacagaactttagagagagtcctttatttcaaagactgtaaagttggaagaattcattcatctgcaaagtcaaatgtcaaaagttgtgcttcccactcctcatcagg

SEQ ID NO: 194 - DNA, 424 bp, Homo sapiens
  misc_feature 9, 12, 17, 30, 179, 187, 265: n = A,T,C or G
cyagggcanttnagcangasaaggaaatanmggggattcaattagggaacwraggakarwcaagttgtccstgtmtgcagatgmsgtgattgtatatctagamcaccccattgtctcagcccaaaatctccytaagttgataagcawcttcagcarmgtctcasgatscracmtcwatnsgcraaantcacmwgcattcttatacaccaatawcagacaaacagagagccaaatcatgagtgaactcccattcacaattgctacnmaagagaataaaatacctaggaatccaacatacaagggatgtgaaggacctcttcaaggagaactacmaaccactgctcaaggaaataaaagaggatmcaamcaaatggaagaacattccatgctcatgggtaggaagaatcaatatccgkgaaaatgg

SEQ ID NO: 195 - DNA, 229 bp, Homo sapiens
  misc_feature 12, 29, 35, 36, 38, 42: n = A,T,C or G
tgaacacccttnggaaggaacctgctcgnatgtannanaaanggaccggacagtctgctaaaatcgccctctttagacgcggcgcgccggggcagagtttttctctggtgctttgacctgtatttggtttaatggttttgtcctaatctcttcaatcaataaaattgtgcgtatttaactaaaaaaaaaaaaaaaaaaaaaaaaaaaaaaaaaaaaaaaaaaaaaaaaa

SEQ ID NO: 196 - DNA, 557 bp, Homo sapiens
gcggtggctcatgcctgtaatcccaccactttgggaggctgaggtgggcagatcacttcaagttgagagtttgagaccagcctgggcaacataacaaagtgagatcttatctctacaaaaaaattaaacaaacaaaaaaacaaatcaacattcatttgcagggctctttggtcttcttaaagaacaaacatatgaaataaataagctgattcttaaagataacaaatataatgagctttctcaactgtaaaagcatctctaagttgttctatcaatgcatatccactccatgaactaacctgaagaaagtgttgaccattctacccaattaactgtaaactaagattgctttaatggtttgcctaaatttgagtacctttaaatttttgctttttatccaaattcattctcccttcttcaaattaaatagttttgttagaaatcggataagcaagatgtactttttagaaagggcaatagaatcctacaacatgctagaatttgaaatgtttttttaaatcagtmmtttctctatgctagtaactaagaaaattata

SEQ ID NO: 197 - DNA, 624 bp, Homo sapiens
ttttactacctatatttaaaatgatccctgacgcccctcaagacaaatatattaatttttttactttgtgggatagagatcagaaaaagagtagagatgaaaatactggagaaacaatgcaggagatatttatgaggtgagaatgtcaagaaacttgtaaagggagaatactataatgacccctgaagagagagctttagaccagttgagtattagaggttgccacgtggctattcatccactaataaatacaagaaattactaaaatggaagccactggaaatatgttttgaggaaggtgagaatgtggacctattataaatgggtgaatatgatttctttctcattaagttcataaataactttcagacatgtaacagtttatgaagtgtgccgtagtcatttagtataagttttatacacaaaagtgtttttactaagactgtcacaggttcttttgtgaatcttgtttgtttttcctcattgtaaatactgcaatagaacatttgtgtcttaacataaggcaataaatgaccttaagaaccttcacttttatatagaaagtggaggaaaagttggcagagtaatttgttgattatagataaaagctcttgtagaaattgg

SEQ ID NO: 198 - DNA, 175 bp, Homo sapiens
ttttttttttttttttttttctaacacttatgcatttattttcatgtgtaagaagaaaaacgtaactagcacgtgaacatgactgcatggatacacggctcagcacgaggctaaagtcagaagtgagtgaaagcaaaaccgcatgttgatttaagtgaaataacagaacagaaaa

SEQ ID NO: 199 - DNA, 871 bp, Homo sapiens
ctgttgatcaatgatgagctcccaagagtaaccagcctctatatagtcagcatcactggtttctcaggaaaagcatcaccattgttcatcttgctgcaaaatgtatgcacaagtatctttttatttttaaaaaagccctgacattttatgactgctgcttttctaagatattttcaaatatacagtccatacggttcagacacaatggactggggatagagacggctatagtgccgataatggagaaactagccagagcttcagatatttgttttccaggacatctcaataattgggtacacctcacaatatgtgagacttgacgtcgagtggcacggcatactctggcgcaggcacttgataaagactgtgtttgcaaatacttagcctgcacttcaagataccaggcatctaagcacgtcccagatggtgacagttaatcttcaaaaaaccctatgtggaagtattatcattgtcctcattttacagatgaggaaaaagagacacagggatgtcaatatcttcctcaaggtcacacagcaagtaagtgatggaacagtggctcagccatgaagctattgctgttaaccactaggttgatttgccttcattaatttcttcctaaaactgcacatttcccgttagtccctctttttggtctgtcgtttgactcttggctactgcttagaggaagattcattctattattttctaacttagtaaatatgtgcaactccttggggacatgaccaggcaaaagctggatacagaaatgtatgcccaaacaccatcccaagttacccctaacaggtcttttctggaccctgtttgtaaggggggtatatttggaaaaatttttaaaattttctgg

SEQ ID NO: 200 - DNA, 737 bp, Homo sapiens
gacattttgaaggtaacagcaatatctgtgtatagatggggttgtggttttgttatttatctgctattgctgaactatcctttgtcttgagcgataaaagagaagtaaaatactaaagaactgaactgtccatttctggaccatgagtaaagatgctggctgtcaaacttcctgttcatacattagtttatttatagagtgtactctctatgtaaggtattgactgataatgttactttgacttcagatagcttgcagtttaatggaggaagaagacaaacatgcaaataactaggtcaatgaggcatcctttgtgttccattggaagctaggctgctttgtaaccttgttaatttctgtggttttggagtgcattcattagcaaatacaccccttgttcttatccattctctgcttttttctttatttggcatttgatgacattttttcatgtggggaaattgagtcaggtgaggtggaaagaaaataaggacacgacactaaattctttgatgtttttccttaaaaaattgtttttcaagtgctccataaagggttgtgaagttttaagagccataggacttggattattgtgaaagagtgtctctagggggccaggttaaaccatttcaaggactctccttctctcatctcccttgttccacccagggtggcgacccccaaaaagcacaaagcctccctttcttcatgggaagggtaaggaacggaagggaacc

SEQ ID NO: 201 - DNA, 493 bp, Homo sapiens
tctagaaatgcagcttttatttattaccccatttctttcaagtccttggaaaataacatattaagggtacaagaaattaacacatgatggaaaagtcattgtgacgccaatgaatttcattgagtataaactcatctacttcaaatttattttataacacaacctaagatactcaagataattatttaatggttagctcttaagttgaattggtctacataatgcgtgggaagaaaaccagatttttagccttcttgccaaatccagacctctggttgatttttctttgacagaagatgcaagttattttccaatttcacaattaaatgtatttaacatgaacattattttgctttaaaaactataaacattgtaggagaattatagccagtcttcagttataaccactccaccctcctcactttctctctctctctctcttttttttttgctatgggatttaatgggaaaaatatgtaaaaactgtcactaa

SEQ ID NO: 202 - DNA, 283 bp, Homo sapiens
cctttttatctcagtgacaccgtccggggacgcaggtggtggtgactcaaggctagcctcaaagggcagccccacctcctcatcctggaccacagagaccacctgcttggcgcgccgtcgcttttccgagagggtggctgactccggggtgctggggctggggctgccgcccccgccgctgttgctgtactcctcgccccagtcgatgggggctgccctcggacagcaggtgcaggttgggggcactgttacgcaagaccatgctgcccggagaggtagatct

SEQ ID NO: 203 - DNA, 713 bp, Homo sapiens
ctgcttttgcgcaaggtgccactggacgagcgcatcgtcttctcggggaacctcttccagcaccaggaggacagcaagaagtggagaaaccgcttcagcctcgtgccccacaactacgggctggtgctctacgaaaacaaagcggcctatgagcggcaggtcccaccacgagccgtcatcaacagtgcaggctacaaaatcctcacgtccgtggaccaatacctggagctcattggcaactccttaccagggaccacggcaaagtcgggcagtgcccccatcctcaagtgccccacacagttcccgctcatcctctggcatccttatgcgcgtcactactacttctgcatgatgacagaagccgagcaggacaagtggcaggctgtgctgcaggactgcatccggcactgcaacaatggaatccctgaggactccaaggtagagggccctgcgttcacagatgccatccgcatgtaccgacagtccaaggagctgtacggcacctgggagatgctgtgtgggaacgaggtgcagatcctgagcaacctggtgatggaggagctgggccctgagctgaaggcagagctcggcccgcggctgaaggggaaacccgcaggagcggcaccgcaggtggatccagatcttcggacgccgtgtaccacatggtgtacgagcaggccaaaggcgcgccttcgaaggagggggctgtccaa

SEQ ID NO: 204 - DNA, 275 bp, Homo sapiens
gtagacaagtacagcagatccagacaccagatctagctaggctaaatgtacagtatctaacttgatctgaactgaacctgtattccttgatgatgcctaaaactacatccatagaattctggtgaacctgtaatacagttctgaaagtacagttttatataataagatgctgatctctttattctttcaagtaagagtgctagagaacaaattgtgttacttgccttgggatttattgaacgtctggaaaatgctgtcttcctagatccaaacag

SEQ ID NO: 205 - DNA, 694 bp, Homo sapiens
ctgttcctgtacatttaactgaaaaaaaagtaacttaaaataatataaaaatagcactcatgtatgtcctacagttataggtgaaatttgatattgtttgtcttacatagcatacctatagacagcttaagtaaagtgactgttaagagggttatgcttattgatgaactcttgtagttgcttaccagctctgttagtatagttaaattgatctcagtagcttcaagtatttataaaatggttgaagtccaaatacatgtgataattacaatacactttgaattaatggagggtgggaggctagttgaaatgcattttatttacccaaggagtatgttaaaatgatagttataaatgttggaagtttaaagcaagatactcagtttagttctttacaaatcataagaagaacaaaattagatgttgacattgctattttaggctgtgtgttttccatatgcttcttgctttccctgtcacaggtggtggcagcaatattggtgtgattgaggttatgctggcaccactcgcacacaggcgcacaatggtgttagctgggcagaaagagtggcatctctggctaccgggctgggggcgacctttaccataggatgaagtaaccttgcattcggctgcaaggtgtactgtaccgtacacaggtgctgggtcgatggccactttctgcttttctttc

SEQ ID NO: 206 - DNA, 704 bp, Homo sapiens
  misc_feature 12: n = A,T,C or G
tttttttttggnaaaaacagggtttcatcatgtttgccaggctagtctcaaactgctgacctcaggggatttgcccgcctcacccaattcaactttcgtaagtcagtatttaccatctaactcagtgtcccaaaatttaaaatttccttgcactttacagcaaaaatacatattggggctctactgaagcaatatatacatgtcaaaactaaaaatcagaaaagcaaaagggtccattcaacatatagcagcttatatttaaatatgtacaggtatgtatgttttcacagttagatctttaaaaaaatttatatttgatatgttcaaaaatacttctattggctataaataatattttaaaagctcaactgatcaaaatgcattccaagaacatatcaaattaaataaatcttctacgtctttaaaaacagataattgaagtcagtaaagcttgaggtttgtgttaagtgtattctgtcagtccctactactagggaaggcagaatcttctaaatacgatacgaaagaaactcccaaagcttggaaggaatcggcagctcctgaactttttggggggggcatccctcttcgggattgacatgcgacataaatgttgcaagctaagggaccccccccgggggagtgggccccaaaaaaaaccacaccttccccgtcaatggtggtccccccaccaaccttaaaaa

SEQ ID NO: 207 - DNA, 225 bp, Homo sapiens
ccattttaactgtactgccaatagaattctggaattgtggaaaattgtatcattgaagttcagtaggatgtgtggcttaaaaatttatcaggaccacaaaaaagaaaacaaaaatatttggtactgaggttcattgccagggcaggaggtatttccagaaaatactcatgcctgtgttctgttccttgctttcccaaatactgcatgtgactttcctaagcggca

SEQ ID NO: 208 - DNA, 678 bp, Homo sapiens
  misc_feature 382, 391: n = A,T,C or G
cctatatctatcaaaaaaaatccagttcctaactaataatctcccaaaaagaaagcaccaggaccagatgatataaatggcaaattttttcaatcatttaaggacaaaataataccaattctgtatcatttcttccagaacacttcctaactcatcgtatgaggccagcatcactctaatagcaaaaccagataaagccattacaagagagagtgacagaccaatgtggttttattgaggatgcaaacaaaatttaacataatatttaatagtgaaaaactggatgctctttccctaagttagagattaaggaaagaatgtccccttcactactcccatacaacaccttactgaaaattctagctagctttataaaataaanaaaaaccanaaaataaaataaaaggtgtacagactggaagatacagtgaaggaggaagaaataaaattttctttgcgcataacatgattcttctatgtggaaatcacagagatttgaacattttttttttttgagacagtttttgctcttgttgcccaggttggagtgtaatggcgcgatctcggctcactgcaaccttcacctcccgaattcaaggtgattctcctgccctcagccttcccggagtaagcttggggattaacagggcatggcaccccccatgcccccagctaaat

SEQ ID NO: 209 - DNA, 720 bp, Homo sapiens
  misc_feature 366, 399, 406: n = A,T,C or G
attattttgaaccctagcatttagaaatgaaaaactttttataacaatcaaatacatgataaagtatgcaaagagtaggaaattattctgatgacatatggagggttacaaaggagaaaactttttgctacctctgataaagaatagactaaattctccaagaccaatctgactggtgtcataataaaaggaggtacacacggaagcacaagggatgtgtgcctctggaggaaaggtcaggtgaggactcagtgagaagacaagccaaggagccaggtcttggaagaagtcaaccctgttgacaccttgatcttggactaaccctgtggacaccttgatcttggacttttagcttccagaactgcnagaaaataaatttttcttgtttaagccacccanagtgtantgttttgttatggcagccctaacaaattaaaattatattttaacagagaatataaaattctaatataacattttacagtaaagcattcatggtcttttttttcttattaataaatccatcaaaacagaaagttttgcaaaattttaacacatttctctaccactactgtttctactctcttaaaactactccgcaaatataaaaatagaaggccaaaatgcatcattaaaacgatgtttggggactaatggccttaaaattctattacacttggaaatatacaaatattcaaagattatctattgatcacctca

SEQ ID NO: 210 - DNA, 277 bp, Homo sapiens
tccatgtatttttatacagaatggaacaatatgtatgtatgcaatykttacattccaccatgaaataaaacagtataatgaaaataacaatagattcaaacaatgatatgctatttttttttacctatgacattggcaaggtcttcttaaaaaatctgcgaataaccgatgttggagagatcatggggaaatagccactcaaatgttactcatgagagtgtacatatgtgtaacttcacttggagggcaatttggtgatacatttaaaaagttttgg

SEQ ID NO: 211 - DNA, 715 bp, Homo sapiens
gtggtagaaatactaattttgcaattacagaaaaaaacaaatgccattcacatggttyctaacaaaaagtgtctgaccacccccaccccccacccctcaaaaagcccttaaataaagaggaagatcaaaagaaaacaaaataattcccgagtttcacctcatacatacaatatagcacaggaagtggcaaagtttaaaataatgcctttactgttaggactagtatgctgtcaaaagccacaatccttttgttttagtgagttgattttcaatagaaaaatacaaatgaacatgtgtttaagttccaacatggattgagcacctctgaatttagtatcaaatgattaattttatttttcagatgtcaaatcttagtataaaattttccattattttaaacttcacttgaatctttaaaaaagctgtctaaattgtactatatgagttcagtttaatcttctgtaaaatgctaacaaattgaactgtcagcagtcttttaaaaaaaaatgggggctgggttatttctagaagaactctcattaagctttgaaaatcagaaatcagagacaaataacttcagatatagactagctccacaagcaaatttatacaattatctgtaacagtctatacatatatgtgtatatatatataccgtaaccactttcataggtaaaaaatattaacttcatgtcacactatgatcagaagtata

SEQ ID NO: 212 - DNA, 717 bp, Homo sapiens
agcctcccccaatgccttaaaaggtcacagtagatctcagctctgaacagaaactcaactgaaactcttcccacaacccagcagtagatatattaaaacctacaattttcagggatacaaccaatatttaattcttttgagggttttgtgtttaatacaaggacacaaacacacgtataaaatgacgatgtcaatactgattaaacagaacaacaaaataagaagctcaaattatcatcagctattgtgtatatctgaaataacaataatgcacttgattctgaaagaatgattagagttcctactctgaaaatctaattgtcttgatgtggcgaagtgagaagaaaggatgatttttctaatgaaaagcatgtatacgggtagccctttgcgagattctgtcaaaaccctgaattttgcattagctgttttaccacccaaacgtttttacccgaggatgtgcagcaatgggaactctcatacactgcttgtgggaatataaatcagtataaccactttggaaaaccatttaacattgtcaactacagctctacacacaagtgctataaccacccattccactccagggtatacaccctaaaaatatgaagtgcccatgtctacccaaaaggccgcctaaaaggaatgcttttgagaagggttaaccttgttaattagtggcaaaactgggaaaacaacccccaaatggtcccatcc

SEQ ID NO: 213 - DNA, 599 bp, Homo sapiens
cctgttttggcgaggcaggagggaagcgggatgggagtggtggttaggccaagggtagttcaaagcgattcagcaggatgatgaccacaggagtgctggagccgggcctttcagcccccgtgtggatgatgaccggccatccaggacatgcgagggcttgggacagtggacagccagtgccacacaaggaaggaccgattaaatgacacagttaaaggaatttggcctagggagtgcaagccagaaaggtttggtctttttatatatgtaacattggaaaaaaggaacatctcctgttccctgtattaagttttgactttagctcagcaaatgcagtgtttgtggcagtaaatatactctgataacaatgttctttcccaggaatttagagttttatgatggttattgaaaatgtttacatgacaggctgtcaataatattttttgcctctaaaaataaaacatacataaagtgtacggattttaagtatgcaactcactgaacttttcataccgtaatacaccaccctagtaaccctcccccagttcaagatgtagactgtttccaataacccctcatcctgttccttaatagccccc

SEQ ID NO: 214 - DNA, 789 bp, Homo sapiens
ccttatgacaaaccttgctatgccaaggatatgcttcactatcttcatctatcaaaacactatgcatcatagatatctaattttttcatctcttgcatgaagtctttcctgatttccctctgctgaaatttctctcttcaaatgatgtgtttccatagtactttgtcccttttcaaagatatatctcacatcgcatattttaccacagttagtttcatttcttaactctcacactagattacaaagtcaatatagacaaagaaatgttcaaccttatataacctcctctgcctatgctggtaaattgcacctactatgtgttcaataagagcttgtctttttcaatatacaaaactttgtaaagattaaagaccttgtagaaagtcaagaggaagatagcaatttcacttctaagaacttaccctaaggaaacattcatgaagagatacaaggggttatgtgcatggatgttcattatcatattattcttcattatgaagattatgatggtaataatgaaaatgattatcttgtattgggccttatttgaagtcaagcattgagaatgtactttatctgcattatctcactgagttctcgtagcagccctataaggtacagactgttatctaagcttaaaaaaataaagttaatgtccaaggtcaaacaactagtaaaagaagggggctaggaaatttggaaccccaaaaggggcaacctctcaagggctatgaatccttaccattattataaggaagcttggcccatggtggcccaaaaaaaaccggg

SEQ ID NO: 215 - DNA, 765 bp, Homo sapiens
ggatgtctgagcaggagagagaccatgtgaaggatggactgaatggagacttgtatcaaagagtctgagtatcaaagacttgtattagagagggttgttgtagtaatctagtcagggtatgagaaatggtttgtattagagtgtcaggagtagtcgtggcaaaaatatatagatcaggatgagggatgggcctcatctcacaccctgactccagtcaatggcagtggctccctggagtacactactataggaaggattttgtaaagttttgtctggcctcagtggagggtgaggtaggggaggagttctatgaacagttagtggtgtctgccatggttgaaacaatggagaagggggacaccttttctgtgcagatgttgcttctggtagatataatccacaatgtaatgggagaagtactaagaatcagtaaattatggagggtgtaaaagactactgatatttaagcctgcggaccggacttagagaaatgatagttaaaggagaaatatccagcaaacaaagatatgacattgaagtttgggactgcgattagtaccagagatttggattggaggtgatttgtatagaatggataggtgattttactcttgcaatttggattgaggggtggggaaaaccagaaaggggctggggggtaaattagtagaaggtcaccttgaattcattgtggtccatatcaatgctgaaactgattggggaactttttactcttgagtccctttgtaagggaaccccagaaag

SEQ ID NO: 216 - DNA, 780 bp, Homo sapiens
cctttttctgtggcaaatggaggcttttcactgcctgtagagacaatacagtaagcatagttaaggggtgggtcagaacatgttaagataacttactgtatatgtattcccttgtattttgttaaagctggaacatttgatatttttccatttatttatgaaaaaatatgaacctattttcatttgtacaaggtaattgttttttaaagcaagtcaccttagggtggctttaattgtataagtcaagcacatgtaataaattcaaaacctgcagttaacaggatattagacatcaatcctggtaaccaaatattaaagattctctttaaaaaagactgaacatgtttacaggtttgaattaggctaaaaggtcttgcagtggcttttcatggcccttcaaattggaatggaactactgtactttgccatttttctataaatcagtactttttttttaattttgatatacattgtgtgaaaaaagaaaatggctaataaactgtattaaatcttaaacaatgtataaagattgcacttagccagttcaaagtgtatacttattcataatgaattataacagttatatttctgtgttttcttgtaaatgtttcttttcccttaaatacagataattcatttgtattgcttattttattatgagctacaacaaaaggacttcaggaacaagtaatgtattagtatggttcaagattgttgataggaactgtctcaaaaggatggtggttattttaaatataaatagctaatgggggtggtaaa

SEQ ID NO: 217 - DNA, 810 bp, Homo sapiens
cttttaggcagcccggcaccttcatccataggcagagagagaactgggtgttggagacttattcgagggtataggaagggccctgtgaagttgatttaacttttggatgtcagactgtgaaagctcctgagaaacttggggtaataggatcttcttttggggatgaaaatggggaaggcgtgaggacctagactacttctccctaggtcagaaaaagagaattaccccttgacaaatatgatacctgctaggtatttcccagggaaatttagggattggcgtctttccctagcatgtggaggaattggcagacagcttcctaagggcggggagcgggggcccaaggctgacactgcttgcatccacgtgaccttaagttatggcagatgactctgaaacggactgaggccaatgagaacagatggatggagcactcaggttagacttgttccttctcctatgctggaggagagggatggttctctagaatgttggaggtgagttgagagctcgcctcttgaatgttgaacagtgtactcttctgaaaactgcatattcactttatgtggtttcagaatactgggctcaatactaacataagaaagacacttcattgagaaattcttaagcttacagaaaacctatctctttgcacattccacataacccctagcaaaatgcaggttcttcatacttctgtcctttttccattggaagaattgcttaaggaaaaattaattcctatttattcccacaaaaggttgggcattgctttgattttaccccatgggggaatgtgcctttgaattt

SEQ ID NO: 218 - DNA, 817 bp, Homo sapiens
ctgctcccttatggaggtctcttcattaataattattggatagatagagaaggtgagcctgtggcttccaagtaccggcttttgctgaaggtctacatgggaagaagagcatcatttgatattcagtagatctgccacacccaactggctccatctcctggaaaacagcactcactacaagcaactgtaatagcacccagcaatgaccacgctgctcctgctggctcttccgtacaccagtaaatgaactcaccaatgtattgcacacatacatttcacagtagtacaataaagccctgtatcaggagtggtaattcaatgacttgactctatagtgcactgcagctttatgtcataccaacattcaaatattcaaatatccttccaatccatttggacaaaaatacaccatggctgccaagacacatgtatttttctttcttccatggactcctaaactgctcccacaatcagcagtgttcttctctcagaaattatcttaagcttctctactcaatgggaggtacacacagagacctgagaatatgcagaggccagaatctctgtctgtgctagagatcaactgtactctgcccacctggggaacacatcctctgggtaaagtactcggaagtaaattacattccctggagacagatacgggctttcactgcagcctgttagaaaacacaatgtctgtaagttacctcataggtcaaagagttttggattatatttttcataatggggctatggcctttttaccctggttttaatacagaaccacctgcagaaaggacattgaaattaaaagcca

SEQ ID NO: 219 - DNA, 661 bp, Homo sapiens
ggatgctgaggcaggaggattgagtcctggagtttcaggatacagtgagctatgatcatgccattgcactccagcctgggcaacagagcaagattctgtctctaagaaaaggaaaaagaaaatgaatagatagtggtattagatgttaatgacatcagttgtttttattctttattctttcttagaaacagattagttttctcgaattaaagaactaccatttttcttttttctacaactttcaagagctggtgaagaaatgatgtttagatttaatagatatagtagcagtcatatattaatagaatagaaactgagactctaggaaaaagatagacatgagataaggagtaggcatggtagacatttctagattatttatgaaaatgttgtagaattcatttttttttttggtctgacctttggcaatggtgctgaggaagggaaagccagcccatcaggcaaggctctgttttctgcattttatcccgtttgattcttctcgttaggattggagcaaataatttcaatatgttcttcgctgggtttatcatagtgacccttcatttaaagggacttttaacaattgacttaaagaacactgagatgtgatattttattgggatttgaaagttgccattgggttttaccttccttaatt

SEQ ID NO: 220 - DNA, 792 bp, Homo sapiens
  misc_feature 169, 171, 172, 399, 400, 401, 402, 643, 666, 724, 727, 731,755: n = A,T,C or G
cctctttttattcctacaaataattttcaagtacacacaattgggtaaacaaagaaacaaagccaccaagaatgaaaatcagtaggaataacgaacaagactcacagatgtcaaacaagtctgtgggtcttgcagacttcagatgttggaattattagtcgtggcaagngnncaaaacattagctattaccattatgtttaccaactagtgaagtgaactatgagaggatatattaaccacagaagttaatagaagaatagactcctgaaaatatctggatgctacaaactaaaatatagtatataatccttcatagagtgtcagtgacttcatatttataattacatttttgtatattagcagtgttctagttcttactgccttatctttaagctgannnnaaataaaattatattttgggattcaaaaacacatagctaatgattactatgtggcagtgttacattactttatcacatatcattaacataatctgcatgtgttcaaagagatcttcatacttctttgtagctcccacttctttgtcgtctttgtagctcccacaacatctagaacagcacaaccgtatatggagaaaactcagtctagtattcgttgaatgactaatggaaaatttagttnataaacagaactttcttcattgnacaaattatcttgcagaagaataatggccttagtttaaaattatcatatttacccatntcnccangttattttatctcttttggctaanaattttgaaaacggtaccttttaccctttggcatttt

SEQ ID NO: 221 - DNA, 759 bp, Homo sapiens
  misc_feature 245: n = A,T,C or G
cttttctgctgctccgggaggtggagtggcctggcagagggcacatggctgccacctgctgcaaggaaaattctcagtgaagactcctcagtatgaaggagataagcctgcacaatcagtcactgatagatgcttagtggaaaaacttccaattcccatttacagctctcagagctaggattaaaaactcctggtcataaactcatgtgatgagaagttatagcacgccctcattttctacatanccacttgcatttatggttggcttttgaacttgctagaagggaaagaagtgcaaatgtgtcctccttagagctactctcctccccttggtgggtttccagtttgtgcattgtccagatggcccaggagctgacgatcaaagggaagaagtcatgtttgtcatgagaatgctttgctgcatcaggattcagtgaagctgttcaccgcctggagcccatgcagcctcaagaggcaggatggagctcagaaaccatcactgaggttagaaagtgagcaccaaagttgagggaagcccacaggagtgagccgaagtgctccctttggatttccaaagtgggtgctgctgcttcttccatcagccttgcttctgaccccaatgcgttcctggtgccttcttcttggcattttgctgtcgggggcccaaggaaaaaaattcctgcatggcagtggtgaaaaaagatggctgcctgctgaaacctgatttggcctgggtaagccttttggagccccggttaa

SEQ ID NO: 222 - DNA, 699 bp, Homo sapiens
  misc_feature 5, 7, 77, 81, 84, 85, 278, 289, 291, 298, 301, 368, 395,433, 441, 508, 569, 633, 646, 667: n = A,T,C or G
ccttntnaagagttggcattaattcttcactaaatgtaggagtagaatttatcaggtaagccacactgacctctggncttnttnncgcccgatgatttttaattagttgaatccctttacttgttatatatgtattcatatattctgttccttcttggatttacttttatgattggtgcctattgaggtatttatttctagtttgtggtacttcatgtgtttaggttttctagacagtggacatagaagattcaagaagctaaatgtaggagaatgtntaatgtagganantgaggcnacnatatcatcaatgaatgacttgaagtttcctctgttgtaaagaatgatattaccataactgccatagntaatattgatggtgtaagtcaaataanaaggcaggaggaaagggacatccatcactgaaccacanatcagagnctcattgaagcctttgagaagaatccacaaaattttacaggataattcatttcctgcgatcaccacnagaagagaaactggttaaacagacaggtattccagagtccaaaaatttacatttggtttcngaaccaaagacctcagctcccaggccacagcaaaagggggcttatgaattccctggcacccagncccaagacccaanaacctcatcttgattggtttngggcttgggaaaccaaaaaaccaatgggtggc

SEQ ID NO: 223 - DNA, 598 bp, Homo sapiens
aaaaagagaaagtttcagatttgccattcaaggcttatttatatatatgtgtgtgtatataaatacatgcacacacttgcatacatatatatttttggctgggggagtgtgagttttgcctttctaagggagggaccgcgcaggctcctttgttctgtattctggcggagatgggtcctggccttgtgtcactggcttatccttaaagatcatctcccatcctccccagcgccatctgtgtgcagcaaccagaaagggatgaacttggccctcttgcgggcctggacaaggtctcttccttaccctttctgttgccagtcagcaacctgtaactcacattctcttcccagtgaatccctgggagcgcctgaccctggtgggctgttcagcttcctgctgctggggccagcaatttttgaggatttatctttaggccaggcttgcctccgtacttatccctgctctcccatttctctcttgtttgagagagaatgaggaagcaaagagtgagaaagaataggggctgaagacgccactcccagatggctctttctatcctgctcttctgttgaaacacacgtgctgtgggcctcaggcg

SEQ ID NO: 224 - DNA, 501 bp, Homo sapiens
  misc_feature 479: n = A,T,C or G
aaacctttatgatgacttccttatgaattactgaacgaacactggaatgggactcaggtatcctgaggacatctctcaactctggccttagttccccctctgtaaaattagggtgccaactaaatgatctacaaggtcccttccagcgccgccattctgtaattacatcatgtgtaactgtattaaacatacacaagtgactgccaggcatgggaatgtaacttccgagtaaatgctttggtttgttcagaatacactatgaacttctttccaaagacgggttgtggtaaatagtggatattttgattataagaaatagagtttccttgaagctttagctggagatacagcaatagtgtggtgttcctacaaatatcacagtgtattcaaacatatttttctatcaaaaatcatttttgtaaaagctgtgtgtttttatccaacttgtgataataaatgttctttattttagaacaaanaaaaaaaaaaaaaaaaaaaaaa

SEQ ID NO: 225 - DNA, 295 bp, Homo sapiens
cctgtatagggctcgtttccccacacatgcctatttctgaagaggcttctgtcttatttgaaggccagcccacacccagctactttaacaccaggtttatggaaaatgtcaggaaaaaaaaaaaaaaaaacacatgcactcacacaatacccaaacatcaraattagaagggcataaaacagggggctttataggctgaaaaatatcttaratttcaraacagaataccaatcaaatattgaaaattcctttgttcaaaacacaaagatgttttgtttttaatgggagttttttt

SEQ ID NO: 226 - DNA, 372 bp, Homo sapiens
agattcctggcttagagcatgcgagcattgaaggaccaatagcaaacttatcagtacttggaacagaagaacttcggcaacgagaacactatctcaagcagaagagagataagttgatgtccatgagaaaggatatgaggactaaacagatacaaaatatggagcagaaaggaaaacccactggggaggtagaggaaatgacagagaaaccagaaatgacagcagaggagaagcaaacattactaaagaggagattgcttgcagagaaactcaaagaagaagttattaataagtaataattaagaacaatttaacaaaatggaagttcaaattgtcttaaaaataaattatttagtccgtatgaaatgaaat

SEQ ID NO: 227 - DNA, 599 bp, Homo sapiens
ggcccccgtcgcgggagccgcttcgggccttctgggcatgtctgccatatggctccaggtttgtttttctccccggcactctgacggggagggctcccggcatctcctggcatccgggtagaggacgcggaggatgctgagctgctggcgcactgcagcacaactagagatgtacggatgcccccatcttgatcttacagaatcagaggtacagccgcgagaaagagtcaagaacagacagagtcgcttgaggactcaggagggtgtttgctgcgttgacaacagactacaccctcacagtttgctctgctcttccaacaccagtggaagatgatcacatcccagggatcagtgtcgtttagggatgtgactgtgggcttcactcaagaggagtggcagcatctggaccctgctcagaggaccctgtacagggatgtgatgctggagaactacagccaccttgtctcagtagggtattgcattcctaaaccagaagtgattctcaagttggagaaaggcgaggagccatggatattagaggaaaaatttccaagccagagtcatctggaattaattaataccagtagaaactattcaat

SEQ ID NO: 228 - DNA, 343 bp, Homo sapiens
aaagtaaattgtatgaaaaattcatttcttcaattgcattagccacattttgagtattcatgtggctggtagattctgtattagcacaaagatatggaacatttccatcaccacagaaagttctgttggacagcactgcattagaatattttcatactgctcttcctcaattaatttttgttgttaatgttgatgtcttcattggatgggtcataatgttccatgaaaccgctcaagtacacaattgtatgttctttgtatcccttaccacaaatatctcgctctgctcatttcttttgcagcttcctataaagtttgtcttcctcaaaaaaaaaaaaaaaaa

SEQ ID NO: 229 - DNA, 417 bp, Homo sapiens
ctcaagctgcagtccaccgggtatggttctggatggttcccccaagggagcaggtatgtaggaggtgaagaaaactgagatttcaagtatgggagagtttttactatctccattcctggattaaaagtgctgaaaaagtccacagttaaacattcctttattcaccctatggctcccaagaaaagcattcttcctctggagtactggtgtactaaggggacaatacaccaaatttgttgagtttacaatcaagtctactaaggttggacttccttatcagtttggcagagtcccagggcagaataatcatccatctacaggtctctgtttcctctccctccgcagcagtggagagcatcccagtgtttggggcactgtgttcctcttcgtccctgcaccagaccctggaagccttgg

SEQ ID NO: 230 - DNA, 462 bp, Homo sapiens
gaaataccagaagagaaagtttcattgtgcaaatctaacttcatggcctcgctggctgtattccttatatgatgctgagaccttaatggacagaatcaagaaacagctacgtgaatgggacgaaaatctaaaagatgattctcttccttcaaatccaatagatttttcttacagagtagctgcttgtcttcctattgatgatgtattgagaattcagctccttaaaattggcagtgctatccagcgacttcgctgtgaattagacattatgaataaatgtacttccctttgctgtaaacaatgtcaagaaacagaaataacaaccaaaaatgaaatattcagtttatccttatgtgggccgatggcagcttatgtgaatcctcatggatatgtgcatgagacacttactgtgtataaggcttgcaacttgaatctgataggccggccttctacagaacacag

SEQ ID NO: 231 - DNA, 328 bp, Homo sapiens
ctgtgggttttcctaaacgcccctcatctggttgaagccctagtgtttctttctcacatcagaggcaaatgcattggggtgggtctggtttggacaataaatttcctctggtttggaccaagaaaaacagagttctttgaccgctaacatatatgtaaaaagaaagtttgtaaaaacaagagttaaaatgcttctaacagtgtggtcatcactgcacaggacactggaattggcattcggggttgtgtctgtccatgtggtttcgttgtatgtcatgtgctctcagctcagacagagacatccaattgacttctgacttggggcattt

SEQ ID NO: 232 - DNA, 595 bp, Homo sapiens
cgccaattttagcaaataagagattgtaaaagaagcagattgaatgaagaatttttagctgtgcagataggtgatgttgggatggaaaatgctaatcaactaccctttcttttatcaagtaattaaaataaatctacataaagaaccaaaaaggctgttttataaaagtgaaatatccagtatttcagagggccaggcaagagcacttcagatgaggcagtcaaaatcatttttttccagtgaggatagaccacaagtgggtggtgagaccattgaaagcctttatcaactgaagagtccatttaacagcataatttgtgggaagactggaatagggctgaataaatgtgtttgaatctctaattttatactttcttttcctgaggaacttgatttttctgtccctggatcgccttgtcataattgggtctgttccttttactaccactcttgagtccatatatgaaatcattaaagttggatgatcagttttttataaaaatatatatttttgtccaagaaaaaaaaaagcatacatatgtgattatggctaaatcaaaggtaactggaatgtatatacttttgctaatgttcc

SEQ ID NO: 233 - DNA, 600 bp, Homo sapiens
atgaaggtaaactctaaaatcttcataggtcaacaaagaaaatttatccttcacacttatttctagaaagcagcagggcttatttcctagattgcttacaatgaagctagaatatctgcgataactgtagagtttcaaaaaggatccctagggctacttctacgttctccttaccagttgagcactctccataatttccagacgggtcatgggggagaatgatagaaatgagcgtgggaagaaagacaatgaaattagaaatgggtgagacacatggtggtagaatgctaagagcagggatcaggacaatcaaccaggtgtctaggaagggtcaagtcaccagtgtcatctgctgaccaatgttaggaagaaataaactcaaaggaaacaccacatttttccaattaaactcaaatctattgacttgtggtggttctttgatgttgtggggactgctataacagaaaccaattggattttcaagggcaagaaactttgccactgaataagatgatgtcatccttcctgataacaaataggaatgggtggtcagctctaaacagcgtggactgagggagttgcttttctacaatattactt

SEQ ID NO: 234 - DNA, 500 bp, Homo sapiens
aaattcctaattcttttactatcttctcaacttttcccaaagataaaataaatttcacataatttcatggaggggaaatggtagttgtaaaaaactacctcaagtagcaatcaccgctggcagtgttttctcactttctgttctgcaattgcaatcacacttccaaaaagaaaagcaaatgtttgctaaaccatagacagacaacctctttgtgactggtattataaggtttataatgaaaacttatcaaatataaaaggtgctccctcttgaaaatgtgtattttatttgaagttttgagtaagaggtgagtgtttggcaattttcaacactcccctcaaaaatctcccaaagttgcaaaaaagtcagtttagtaaaattccaagcacttaaatgcttcattgagggccagttgatatacgcaatgcactaatgtgtaaaaattaaccgaatgcaactattttataatggagagctcttaccttttccttccagttttt

SEQ ID NO: 235 - DNA, 159 bp, Homo sapiens
aaaatttacagataaaggcagttcaatactgccactgagaagtacatctcttaacatatacaactttcaggccacagttttgaaggtctgaagtattaagttggtttgatgaattagtcggttggcacttacgaacacatttattgccttgccatcttt

SEQ ID NO: 236 - DNA, 254 bp, Homo sapiens
aaataagtgaataagcgatatttattatctgcaaggtttttttgtgtgtgtttttgtttttattttcaatatgcaagttaggcttaatttttttatctaatgatcatcatgaaatgaataagagggcttaagaatttgkccatttgcattcggaaaagaatgaccagcaaaaggtttactaatacctctccctttggggatttaatgtctggtgctgccgcctgagtytcaagaattaaagctgcaagaggact

SEQ ID NO: 237 - DNA, 591 bp, Homo sapiens
  misc_feature 497, 505: n = A,T,C or G
tttttttttttttttttttttttttttctaatttttactttttctcaagtttaatgtaracatacaaraaaacatcaagcaatgtttattgkgcaattccaatcattatttgcaraatcttggtttaaagtcagtytttatagccatttcaactgcttggtttaaacaaaaagcaacaatctggttatytacctataaatttcatggtatttytttaaacactgaagtactaaaagcactgatgatttgtattataatttttaaaatatttaaaacctacacagatttcataratcattccttttataaaataatcaaaataatttgattatytggaaaaaaaaattcttgaaacaragccctttccaggtatyttcaatctctgtaaaaccccaaaccccaaacagagtaratgatgaaataaggatttctcagttgcccaagactgtctgaaatttaaggttgaaaaatggactggcgtttttcatgtttcctgngaattcanagcttacaggtggcatcaaaactcaaatctctgggatggctttacatggctttcactttgatttgtttcattttcatttgcttctt

SEQ ID NO: 238 - DNA, 252 bp, Homo sapiens
aaatggcttttgccacatacatagatcttcatgatgtgtgagtgtaattccatgtggatatcagttaccaaacattacaaaaaattttatggcccaaaatgaccaacgaaattgttacaatagaatttatccaattttgatctttttatattcttctaccacacctggaaacagaccaatagacattttggggttttataataggaatttgtataaagcattactctttttcaataaattgttttttaattt

SEQ ID NO: 239 - DNA, 153 bp, Homo sapiens
ccacaataaagtttacttgtaaaattttagaggccattactccaattatgttgcacgtacactcattgtacaggcgtggagactcattgtatgtataagaatattctgacagtgagtgacccggagtctctggtgtaccctcttaccagtcag

SEQ ID NO: 240 - DNA, 382 bp, Homo sapiens
aaaaaaaccatctaaaagtggttttttaatatatatattttttccaaaggaagaaatttcttgcttttactcagggaaaaaaaaaaattaaggtacatttgagtagaatgatttcatctaaaagagttctttcaggagacatctgtgattcactgcattgtttttattttcttctttttcctcttcttttccaacatttctaccattttcctcttcttggttgatatcaggccactttcttttgttgctttcttactgtcacctgttaaaccgcgtttctttgtgttaggttttgaccgcttttcttctttgtgcactgtgtcaccaggctcctttttgccaattttggactgttctttacttacaggagaaggctctgcag

SEQ ID NO: 241 - DNA, 400 bp, Homo sapiens
ggcatgagccaccgcgcccggccctatcttttacttttataaatagagatgaagtttcaccatgttgcccaggctggtatcgagctcctgggctcaagcgatcccccaaccttggccttccaaagtgctgggattacaagcgcgagccaccgaaattattcttaactagcaagactaggctctgacatcacatccttatagttacatccctttaagcagggttcagccactcactctgcacctggagaacttgatggttatccctcgaagtgacagtcctgcaaatgacaaaaacactccaaatctattaggttggtgcaaaagtaattacgctttttgccactgaaagtaagtcccacaggaccctgagggaaatgggagggtggggtatacatagcag

SEQ ID NO: 242 - DNA, 75 bp, Homo sapiens
actcacatatgcagacctgacactcaagagtggctagctacacagagtccatctaatttttgcaacttcctgtgg

SEQ ID NO: 243 - DNA, 192 bp, Homo sapiens
gctccacatttgtagcgaacactttgactccaaagagaaggaggaagacaaagacaagaaggaaaagaaagacaaggacaagaaggaagcccctgctgacatgggagcacatcagggagtggctgttctggggattgcccttattgctatgggggaggagattggtgcagagatggcattacgaacctttgg

SEQ ID NO: 244 - DNA, 616 bp, Homo sapiens
aattttatagcaatatactgaccattctaaaaataacaaaatacatgttgctctcaactacatagttaaaaaaggtagtaaattctcttacccaaaatagaggaggggtgggctagtgagctgctcaaacatttgtaacaaataaaaatgtatctatatacatataatgatcatgttttcatagcctaaaatcaccatacaaaatctaataataaaattgtgtcgtgttcaggagttgggaagccaacacattaaattaacaaagtatttttggtatatgtaaataatgggatagaatctctcgaatcaggattgtcccagaagttctaaggcagatgtcaatgacatgcacattgtccatgttcagtaattttcaaagactagaataaactatgtaaactattcaatacaattcaatattacttaactgctaaaaagtacttcaagatcttgcactgccttgagtgagtataatcaaattagtaattggaaaatagctgtaatagcaggcactgaagaattctgacaaataccaaataactgtttgtttttaccaaataaactggtaagatgatatcacaaagggttttaagttattttgctatacaaggttttt

SEQ ID NO: 245 - DNA, 165 bp, Homo sapiens
ttggaacagtggattaaaatccagaaggggaggggtcatgaagaagaaaccaggggagtaatttcttaccaaacattaccaagaaatatgccaagtcacagagcccagattatggcccgctaccctgaaggttatagaacactcccaagaaacagcaagacaagg

SEQ ID NO: 246 - DNA, 229 bp, Homo sapiens
tgtactggatccctccaggtgggggcgactctcacctgactattacaatagcctcctaagtggtttccctacttgcaaccttgcccgtataatatctatcctccacacagcaggcagggcgatcctttaagaatagaagttagatcatgaaaatgctctgctctgatccctgcaaaagctcgccacctccttacagtcaccgctgaactcgtagcagaggttcaggagg

SEQ ID NO: 247 - DNA, 338 bp, Homo sapiens
  misc_feature 67, 206, 244: n = A,T,C or G
ggaaaccgtgtgtacttatcctggatgatgccaccagtgccctggatgcaaacagccagttacaggnggagcagctcctgtacgaaagccctgagcggtactcccgctcagtgcttctcatcacccagcacctcagcctggtggagcaggctgaccacatcctctttctggaaggaggcgctatccgggaggggggaacccaccancagctcatggagaaaaaggggtgctactgggccatggngcaggctcctgcagatgctccagaatgaaagccttctcagacctgcgcactccatctccctcccttttcttctctctgtggtggagaaccacag

SEQ ID NO: 248 - DNA, 177 bp, Homo sapiens
tgaaaacaaatgaattctcaactcctacggttcatgtagagtttagagaaaatttccatcattgtcatcattgaactgtgaacctgggaagccagatcatgattaacactgacatcaagtttcaagttgcagatcaatgcacccagtgttcagatgaggcaaacttctccgtgacaa

SEQ ID NO: 249 - DNA, 263 bp, Homo sapiens
aaagtaatgactttattaataaatatacatccatatgatgatgtagatacaaatcatgaacactactccattcccatacacataattgcacacgagtagctcaagttcatggacataaaaacatacacagtatctattcagactttttacagcagaggacagcgtgcttattatcagttaattggtaattattttctccaaaattacctgtggaaaaaagaaattctgaaaacttaaaagaatcaaagtgatctgattacttt

SEQ ID NO: 250 - DNA, 333 bp, Homo sapiens
aaaaaaaacaacagcgtaaatattagcccacaagagcagtcctaaacaatcacaattacactgtactacccaagaagactgtttattgtgaagcatttacctttcaaaaaatcattacatttctatttcttggtggagcagcacattgtggagtgtgattcttaattcttcattgagtttgtcaataggacattgatgctggataggttgtcttttgtttttatgcctcagaccatcttgtgagattgtttgcctatctcataatacagttttatgcagaaaggttgaaactatgtaaatggtttttatggaaattatcagttacaatatttt

SEQ ID NO: 251 - DNA, 384 bp, Homo sapiens
aaaccatttgtacaaaacttctataaatttttctctctctttctctcttatgtacaaaaatatcttaatatatccccgaactggttaggatagatacaaatagattttttataataaaaaattcacaaaagattggaagcattctataatgaaaatggtagaaaagacagtgtgagggaagccatggggtttgggaatcgggccctggaggagaagcagagtttcaaagggctgagaatagcatagtttcactgtaaaccaatgtctacagcttattggggtgggggctactgagacgaaagacaccaactcgtttctagagggctaagaactgcactttaagaaagggcggggaggtgaagggacccgagcaagaactttcag

SEQ ID NO: 252 - DNA, 211 bp, Homo sapiens
aaagcagtctgaaaatgggacatctgtagagaaattcatttccttcttctcctccggatgtggaatggaagctttgagggaaggaaaagtaggaaaagagcgggatgggatgggatgggatgggatgggatgggataggaagagaggctggggaatgggcagagaagggggtgctgagtgtgctgtgagatagagcaagatcacaagaagg

SEQ ID NO: 253 - DNA, 135 bp, Homo sapiens
aaaaattgtttcttgacaagctgacttggcacttaagtgcacttttttatgaagaaaaagtacaatgaactgcttttcctcaagcaataattgtttccaacttgtctgggaattgtgtgtctggtaactggaagg

SEQ ID NO: 254 - DNA, 361 bp, Homo sapiens
cctgtagcccctgctacacgggaggctgaagtgggaggatcacttgaaccaatgagggtgaggttacagtgagcccagatcatgccactactctacaggctgggtgataagagtgagaccctgtatcaaaaaaaagacaaggaaaaaaaaaactgggccgtttgtttttgcagaatgtctctcaatttggactttttgggcaggaatacaatacaagtgatacaaatgcttctttaacattagaacctgtataaaattaccattacagaccttgctattttacttataggtaaatcactgtttaccaaggtaagtcttttgggaatttccaaaaatgaagtccatggacagttaaaaactg

SEQ ID NO: 255 - DNA, 331 bp, Homo sapiens
aaaaaaataaataatccaccaacgtgattgaccttggcgagatcatgtttctagtctatacctcagtttccccatctgtaaagtgaggataatgtcccaccccatgtaactgtggtgaggaccaactgcaacactgtgcctgcgagtctccttggaaaagtgtaaggttctacacaaatggaaagtgatctgatcacactcagtgtccccagcccagcctttcagtgccctggccctggggtgggggacaatactctcctcacccccttcactagtcttcatgaatagcaaggaggccataacataatttggtctaaaccccttccttttt

SEQ ID NO: 256 - DNA, 186 bp, Homo sapiens
  misc_feature 115: n = A,T,C or G
cctttgggcccttgcactttgacctgcaatggggccacaccagccttgcttgtgtccacctggaaggactgagggaggttggcacgaaccatgcctgggctcaggccgggcccanagcacttgaccttggacgcatctgtcacatcatgcacagggaccttgaaaggactgcctggcacttgatgg

SEQ ID NO: 257 - DNA, 255 bp, Homo sapiens
ctggggtccgtcaccgacctttggggaactgggctacggggaccacaagcccaagtcttccactgcagcccaggaggtaaagactctggatggcattttctcagagcaggtcgccatgggctactcacactccttggtgatagcaagagatgaaagtgagactgagaaagagaagatcaagaaactgccagaatacaacccccgaaccctctgatgctcccagagactcctccgactccacacctctcgcggcag

SEQ ID NO: 258 - DNA, 604 bp, Homo sapiens
ctgaatttgcaatggagtttggtggtgcaatcggtattgattagtttggcatagacagatgcagcagtttagagcaaaatcgagaaaatgattttttttttcctccttgatttcctggcagaagatatcttactttttcagcaaacttttcttttaacactaaagcagcctagggcaatgccagatacttagagcttttctcttgattataagtagaaatgggggtgtctgggctagaggtggagggtggatgtgctgtcgtcacagtctagctggcagcaagcaaggcaaaagcagagactgctctagaagcggttccaagcagcagagacgtcaggaaaggcacttcttagtaccaacctctatgctttaatagttgcttgttaagctgcttcatgggttgagacaaactaccagcacttcaaagagctcagttctctgctcaactctcttctctagttacattattttttttccttcaggagactgaggcaggaaaatcgcttgaactcaggaggtcgaggccgcagtgagccaagatcacaccaccgcactccagcctgggccttgcaaagtgctaggattacaggaatgagccaccagg

SEQ ID NO: 259 - DNA, 429 bp, Homo sapiens
aaaaatgtctgtatcgagatcttccagtttgaagtcttcctcctctgtgtcttcccaaggctctgtggcaagctccactggttctcccgcttccatcagaaccactgacttccacaatcctggctatcccaagtacctgggcaccccccacctggaactgtacttgagtgactcacttagaaacttgaacaaagagcggcaattccacttcgctggtatcaggtcccggctcaaccacatgctggctatgctgtcaaggagaacactctttactgaaaaccaccttggccttcattctggcaatttcagcagagttaatttgcttgctgttagagatgtagcactttatccttcctatcagtaactgctccgtgttcagactcctggtttcttccaggcttacagtggacatcatcagcttcctgcttt

SEQ ID NO: 260 - DNA, 385 bp, Homo sapiens
  misc_feature 179, 318: n = A,T,C or G
ctgcaacacatgcagcaccagtctcagccttctcctcggcagcactcccctgtcgcctctcagataacatcccccatccctgccatcgggagcccccagccagcctctcagcagcaccagtcgcaaatacagtctcagacacagactcaagtattatcgcaggtcagtattttctgaanacgcatatggcagacggatttgcgtataccaaggagagtggcataggagggaaaagcatatgtggctgaaacctgtaagttggtgttggttatgcagaaatgtgtaacagatcaaacggtcctctcaagtgtctattanataggcaataagaactgcagtgtagctgagtaacatcttttagctgactataaatcactttgttttt

SEQ ID NO: 261 - DNA, 230 bp, Homo sapiens
ctgtactggatccctccaggtgggggcgactctcacctgactattacaatagcctcctaagtggtttccctacttgcaaccttgcccgtataatatctatcctccacacagcaggcagggcgatcctttaagaatagaagttagatcatgaaaatgctctgctctgatccctgcaaaagctcgccacctccttacagtcaccgctgaactcgtagcagaggttcaggagg

SEQ ID NO: 262 - DNA, 198 bp, Homo sapiens
  misc_feature 88: n = A,T,C or G
atgttaagtaaacatgaaatctatataacagaacaaaaattcactcttatgtcaatgtcagcgtgttaatgtagatctatttactganacagactctgtagtggcagagagtggccttgttaagccaggaccctgttctgcaggctgtgggtagaagctaggaagtccctggagtttcacccagcttttccatgaatg

SEQ ID NO: 263 - DNA, 157 bp, Homo sapiens
aaaatatatttctaaacagaatgggccgactcagtcacagtaactgttgatctccatagtagagcaacccacaaagacagaactgatttttttcccataatcaggggtgaaaaatatacaacttgtttctgaaccaaaaccacaatttctgcagttt

SEQ ID NO: 264 - DNA, 290 bp, Homo sapiens
ctggctactccaagaccctggcatgaggctgaggacaacttacaagggcttcaccgaagcagtggacctttattttgaccacctgatgtccagggtggtgccactccagtacaagcgtgggggacctatcattgccgtgcaggtggagaatgaatatggttcctataataaagaccccgcatacatgccctacgtcaagaaggcactggaggaccgtggcattgtggaactgctcctgacttcagacaacaaggatgggctgagcaaggggattgtccagggagtcttgg

SEQ ID NO: 265 - DNA, 234 bp, Homo sapiens
aaaaaaaggaaaggaaagagaggaaaagaaaataaaataagacgatttattgcttctcctcagcatcctccttggtctcctccttcaccgagagagcttctagcttttccgccactttttcggcatgatcatttttgcctgatcctttcttttctctctcttcgatctctttcctgcattcttcaaactttgttttgaatttctgtgcattctcagcattcaggaagcggatgg

SEQ ID NO: 266 - DNA, 335 bp, Homo sapiens
gtcctcatcatcccagtttgaggcagtgctggagtggggaaggccgtcttagaccatagaggttggaagacgctgagagatcatccagcccagccccttgatgttacagagcagaagacagatgcccaaacaggagaaggcacttgcccacggtcatacggcaggttgccacaaaaccaagatggcagcccttcctcagcgtgcctcactgccactcccagagccagggagccccataaaacccacatcatgtcttaagagtatatctggctccttgaccagcaatcggccctgggagccaccaggtgggaaaagcgcctctgccagagtccagg

SEQ ID NO: 267 - DNA, 619 bp, Homo sapiens
  misc_feature 69, 86, 119, 205, 352, 547, 580, 611: n = A,T,C or G
tggagctctgacgaagggatcggggaggtgctggagaaggaagactgcatgcaggccctgagcggccanatcttcatgggcatggngtcctcccagtaccaggcccggctggacatcgngcgcctcattgatgggcttgtcaacgcctgcatccgctttgtctacttctctttggaggatgagctcaaaagcaaggtgtttgcanaaaaaatgggcctggagacaggctggaactgccacatctccctcacacccaatggtgacatgcctggctccgagatccccccctccagccccagccacgcaggctccctgcatgatgacctgaatcaggtgtcccgagatgatgcanaagggctcctcctcatggaggaggagggccactcggacctcatcagcttccagcctacggacagcgacatccccagcttcctggaggactccaaccgggccaagctgccccggggtatccaccaagtgcggccccacctgcagaacattgacaacgtgcccctgctagtgccccttttcaccgactgcaccccanagaccatgtgtgagatgataaagatcatgcaanagtacggggaggtgacctgctgcctgggcanctctgcca

SEQ ID NO: 268 - DNA, 147 bp, Homo sapiens
cctataacccagacaccagcatggacaaaactcagttatactgaattcagagacaaaattcagtgacactcttctaccacttatttagggttctacagcatttcactgagcagacttagttttttgtttttgttttacaaacctttt

SEQ ID NO: 269 - DNA, 325 bp, Homo sapiens
ctgagctgtaggaatgggttcttggtacacaagatagtattgttgagctagttttcgagctctgtgcacaagcactctgtaatcggggcccatgccactgtacaccaaacctatatgcttggtaattggttctactttgtgtacacttcgctcatcatacagaatggatttctgttttttctcagttgctaataccacaccatttgcagctttaattcccacggacggggctcctccagctacagcagccaaagcatattcaatctggacaagtttaccagacgggctgaatgtagtcagcgaaaagctgtacccgcgctccgcc

SEQ ID NO: 270 - DNA, 428 bp, Homo sapiens
aaacatatggtaaattaccgagtgacacctctgggctagagacctcttttgaggggagtttgcaaactacggattcaatttctttaacagttatgaagttctttaaagaacctgtttggtattggggggttgtggtcacctgtgcttttctgagatttggcccctacatctaagttgttgaatgcatgtgtgtagagttgtttatggtgcttccctttcttcttagaagggtctatagtaatatcccctgccttatccctagtagtactaatttgtgttttcttacttcttgacaggcaaacacatcagagcataagtggttcctaatgccaagctgacctcccttgatctctgtcttctacaggatattgacatgggacttctttattaccttttcagttcactgataccttcaaatagctttattt

SEQ ID NO: 271 - DNA, 206 bp, Homo sapiens
  misc_feature 18, 21, 33, 118, 180: n = A,T,C or G
cgtcccggagcccacggnggncatggctggcanagcgctctgcatgctggggctggtcctggccttgctgtcctccagctctgctgaggagtacgtgggcctgtctgcaaaccagtgngccgtgccagccaaggacagggtggactgcggctacccccatgtcacccccaaggagtgcancaaccggggctgctgctttgactcca

SEQ ID NO: 272 - DNA, 83 bp, Homo sapiens
ctggcttccctgagaactcaacaatgccttttcctgagggccttcctcgatcatccacaatgactacagccctctctacctgg

SEQ ID NO: 273 - DNA, 472 bp, Homo sapiens
ctggagaaggtgtgcaggggaaaccctgctgatgtcaccgaggccaggttgtctttctactcgggacactcttcctttgggatgtactgcatggtgttcttggcgctgtatgtgcaggcacgactctgttggaagtgggcacggctgctgcgacccacagtccagttcttcctggtggcctttgccctctacgtgggctacacccgcgtgtctgattacaaacaccactggagcgatgtccttgttggcctcctgcagggggcactggtggctgccctcactgtctgctacatctcagacttcttcaaagcccgacccccacagcactgtctgaaggaggaggagctggaacggaagcccagcctgtcactgacgttgaccctgggcgaggctgaccacaaccactatggatacccgcactcctcctcctgaggccggaccccgcccaggcagggagctgctgtgagtccag

SEQ ID NO: 274 - DNA, 205 bp, Homo sapiens
ccaggcggcccgaggacttacggtcggcacttctctgttctcccgtgtcagcgtgtggtgtcgcctgcatgggtcgtacctggatggtgtgtccaccatcgacacggaggggctggatttgtttctcaggcaatcctgtattttaattttagatgtatttcctgaagcatatttttcatagaatgtagcgtgtaaatagcttttt

SEQ ID NO: 275 - DNA, 308 bp, Homo sapiens
ctcctcgccctccccaccgacatcatgctccagttccagcttggatttacactgggcaacgtggttggaatgtatctggctcagaactatgatataccaaacctggctaaaaaacttgaagaaattaaaaaggacttggatgccaagaagaaaccccctagtgcatgagactgcctccagcactgccttcaggatatactgattctactgctcttgagggcctcgtttactatctgaaccaaaagcttttgttttcgtctccagcctcagcacttctcttctttgctagaccctgtgttttttgcttt

SEQ ID NO: 276 - DNA, 201 bp, Homo sapiens
aaattaactttttcttgcaaaatattcatttcattttttccaagaaaatcttataaaggcaaaaataaaattttattttggcaaatgtcatgaagtcgatactggcagcatatggagttagttaaaaatagacaacaactgctagatatattcaaaattctatttttttttctgagcatagtcaaagagaaattttcattt

SEQ ID NO: 277 - DNA, 520 bp, Homo sapiens
  misc_feature 32: n = A,T,C or G
aaaaaaaaagtattcagcaccatttgctcatnggtctttcagagtttgttcttaaagtttctggaactttcctgtctgtaaagtaacaggaattactgagctacattggaaagcctctctgggacaggcagtggggagttaagcagtcatcataaaggaatcagtgtacattcagcatggtgacttgactacacaacaatcccttcccctctactgtagctcaagagagacatgcttctaaccactgaggtatgaggagtctcagactgttatttgctgttagaattggtcttcccagctaataacagtacatctctggcacagatgctattggtccttaatgtcctgtgattttaggaaatagtttggatttagttcaatttattcagaaaccaaacgtgtttaattagcttcactactctggcagagtaagggtatgctggtttagtatctttataaaatatatataatgtataggtaaatcatagtcttaaatcatacctaaaatactgtatcattt

SEQ ID NO: 278 - DNA, 264 bp, Homo sapiens
cgcgccgggcggaactttccagaacgctcggtgagaggcggaggagcggtaactaccccggctgcgcacagctcggcgctccttcccgctccctcacacaccggcctcagcccgcaccggcagtagaagatggtgaaagaaacaacttactacgatgttttgggggtcaaacccaatgctactcaggaagaattgaaaaaggcttataggaaactggccttgaagtaccatcctgataagaacccaaatgaaggagagaagttt

SEQ ID NO: 279 - DNA, 414 bp, Homo sapiens
aaacatacaataatttttattatggaaattaatctttacatacaaaatcagctacgtaattttacttacaaaacaataaaaactgttctttactgtggcaacaaaagaagcattttgacaaatgaaaaaaattaatgcaaacaaattaaaacaatgcttttctttttacttgcttcactgtctcttctatttattttctatgatcatttgacacaaacatggattactttgatatctactgaaacataaatgataaggttcttaaaggttgaattaaaagtctgggtgttcaatattttagaagctgaataaacaaaacgaaattggggtttgtgattacagaggatttatcattttttccctttgtccatatgaaaatatataatagaaaattacccacgggaaaacattttt

SEQ ID NO: 280 - DNA, 262 bp, Homo sapiens
ccaccatgcctggcctgcttcaattttttgatgccactttgtaaacggcacttaattatggaaaataggaaaaagcaaaactaaaataaggaagaggatatatatataacttttcacaatctcttttctgatcccctttagatgcccagtcaaccaggaccacacacagatttcattttatttgtagagtatatgaaaagatttaatagtctcatgcattttattttacgtatactgatttctacgttttgactgactattt

SEQ ID NO: 281 - DNA, 349 bp, Homo sapiens
ctgtgacccgggtgcatcagtggatatagttgtgtctccccatgggggtttaacagtctctgcccaagaccgttttctgataatggctgcagaaatggaacagtcatctggcacaggcccagcagaattaactcagttttggaaagaagttcccagaaacaaagtgatggaacataggttaagatgccatactgttgaaagcagtaaaccaaacactcttacgttaaaagacaatgctttcaatatgtcagataaaaccagtgaagatatatgtctacaactcagtcgtttactagaaagcaataggaagcttgaagaccaagttcagcgttgtatctggttccagcag

SEQ ID NO: 282 - DNA, 381 bp, Homo sapiens
  misc_feature 209: n = A,T,C or G
aaacactaaatgaagcttctcacaatttctaattataaacaaaaggctgaaaacagtatgggaaacaaagtttcaaaacaaagaaaagttgagtaaaaggtgccccctctatggctcatctgaaagaaacattttactcagagaggcaaacatttctgatctaggagtaagtttcccactcactttgcaaggacccactcattctgcanaaagacctacaagtctttctggtctcaattgcaaagtacgtgaaaatgtgtatgaaagatctaaaagctaaatattagaataaggctaattgaaatcaaaattgtgtgctggtctaaatatacatcttcggcttcttcctttttagtaagtatttttatttcagatgtattt

SEQ ID NO: 283 - DNA, 543 bp, Homo sapiens
aatatagctcctccctacccccaacaatggaccctgcccattgcctcccagttccttgatcttcctaggttccacaactctctttttccttttagttttattccctccagccaaacctctcttattcaatattttgagccaatgggggagttatgtagatttttttccctacacattagctggccccttttatgaccaatgactcataaggcaagatgtgtggtggcatcttcggacaggcagcaggctttaatagggcagcctgggttggtggaggcaagcaaagctaattggcatgcgtgggaatcaaaccccaggccctgggctcattagcccatggtcaaaacaactgagccagaggaggtaataatttgcccaagaatatcagtagttcctttattagaagaaaatggctgatatggaagttggggaatctgaattgccagagaatcttgggaagagtaataagctcttagtctcaacaaaaagtgttttttcatctcagcgcgtaaagggtgctatatgggaacaaagaagtatttt

SEQ ID NO: 284 - DNA, 147 bp, Homo sapiens
aaactggtattttatctttgattctccttcagccctcacccctggttctcatctttcttgatcaacatcttttcttgcctctgtccccttctctcatctcttagctcccctccaacctggggggcagtggtgtggagaagccacagg

SEQ ID NO: 285 - DNA, 316 bp, Homo sapiens
cggccgaggtctggcttcactcctactccctctctgctcgcagcacgtcggccgccagctctttgatgtgttcccaggcccgctgcacatgggcagattccaccgtgcgagaacagatggcaaagcgcaggacaaacttgtccctgaggtgacatggaaccaagtggatttttttggcactgtttattctttgcagaagagcttcattcactttgttggaaccctttagccgaaagcagacaagccccagaatgacttccacacagatttcaaagcggggatcctggcgcaccagtgactcaaactcatgggacag

SEQ ID NO: 286 - DNA, 322 bp, Homo sapiens
cctggggagccctttagtggggtgggacctcaggcagacccccaaaccaaagggagccagatgcccaagttcaagtcattagtgatatgtggcagggctgacagagaaataatcctggaggtctccaaagctgctgggaatggaatggcgatgaaaagcgcaggagtgggcagggtgtggtgggtgatggtggcctcactcagagtggaccaaggccccagctccttgcccaaaaccaaagcccttgggcccgaagtttttagcataacatcctttgcagtaaatctcgccatccttgtctgccagggtggttgactcaagg

SEQ ID NO: 287 - DNA, 364 bp, Homo sapiens
ctgcccacgctcaaaccaattctggctgatatcgagtacctgcaggaccagcacctcctgctcacagtcaagtccatggatggctatgaatcctatggggagtgtgtggttgcactcaaatccatgatcggcagcacggcccaacagttcctgaccttcctatcccaccgtggcgaggagacaggcaatatcagaggctccatgaaggtgcgggtgcccacggagcgcctgggcacccgtgagcggctctacgagtggatcagcattgataaggatgaggcaggagcaaagagcaaagccccctctgtgtcccgagggagccaggagcccaggtcagggagccgcaagccagccttcacagagg

SEQ ID NO: 288 - DNA, 261 bp, Homo sapiens
aaaattataactactcattctttctttagccttagttaatttgagcagaagccacaacaagcaaaccacaataaatttagaattggcagaaatccacattaactcctcttcccaagtttccacactactaccatttacagttgtaggtttgtaatgtataattatgtaatgcagaaactagctttgacttgtgtaacgatgcactgtcaaagtaagcaaagtaagaattgaaattccacattcccagaatttaacactcag

SEQ ID NO: 289 - DNA, 261 bp, Homo sapiens
ctgagtgttaaattctgggaatgtggaatttcaattcttactttgcttactttgacagtgcatcgttacacaagtcaaagctagtttctgcattacataattatacattacaaacctacaactgtaaatggtagtagtgtggaaacttgggaagaggagttaatgtggatttctgccaattctaaatttattgtggtttgcttgttgtggcttctgctcaaattaactaaggctaaagaaagaatgagtagttataatttt

SEQ ID NO: 290 - DNA, 92 bp, Homo sapiens
ccactacccgaacttacaggtgccaaaagaagaaagggtataaacggagaccacctatcactcatcagaacctaggatcatcacattccttt

SEQ ID NO: 291 - DNA, 287 bp, Homo sapiens
ccatggctccgctcagggccccggtcacctccgagtcactctgttccttgactgtctttgtgtttctgtacctcaaggcactgaagctggaggactctgtccatgcctgtgtcaccctcgtgtgggagcctctgggctcggcaggtccacatttcatgagctgaggcgtgggccagggccatctggaaagggaactcggcttttccagaacgtggtggatcatctgtcgggtgtgtggtgaacacgttcagttcatcagggcctacgctccgggaaggggcccccag

SEQ ID NO: 292 - DNA, 270 bp, Homo sapiens
ccattgtttcctcgctggcgaaggctccttgaacatccctcaccttcctctcccgcctctgccttctgctgggtcaaaggtggccttttctctccagccttgaattgttccctgttggcttcccaagggcccatctgctggtacagtccacacttccacagccaagacccgagagggctttcactgccccaagcctctctcctgtgaccctgggattctgtcttggcagaatcctttgtcagcggctcttactctgtccttcctgtttgg

SEQ ID NO: 293 - DNA, 333 bp, Homo sapiens
ccatgctcgtcaacctggtgtccactgcttgctacgtctccttcctcttcctgggctgcgacactggccctgtggctggggttactgttccctatggaaacagcacagcacctggctcagccctggacccctactcgccctgcaataataactgtgaatgccaaaccgattccttcactccagtgtgtggggcagatggcatcacctacctgtctgcctgctttgctggctgcaacagcacgaatctcacgggctgtgcgtgcctcaccaccgtccctgctgagaacgcaaccgtggttcctggaaaatgccccagtcctgggtgccaagagg

SEQ ID NO: 294 - DNA, 123 bp, Homo sapiens
ctgatacaaatacagaaaactctgcccattatccaagaaacaaataattaagactaaaatgcaagctgatgtgttgcagcattgtagggccactaaatagccatctgtgattcgtggcaattt

SEQ ID NO: 295 - DNA, 311 bp, Homo sapiens
ctgcatacagacatttgtttaggtcatctggattatcttgattgtcaccatggcaactatccacaaccagtgcctaggtgtgtgagaagagtgatacaataatactgtggcatggtcatttagctaatccagtctaagcctaacagaaaccttttccatcaaagtttttcagagaataacaacatctcataagaggccagaggatggcttgtgcttaatatcacacctgtacagtagggcagtgcttcccaggctgtctgcttacattttagcttgtcttacggttacatatggttttagtattttcattt

SEQ ID NO: 296 - DNA, 241 bp, Homo sapiens
ctgcggaagatctgcaaccacccctacatgttccagcacatcgaggagtccttttccgagcacttggggttcactggcggcattgtccaagggctggacctgtaccgagcctcgggtaaatttgagcttcttgatagaattcttcccaaactccgagcaaccaaccacaaagtgctgctgttctgccaaatgacctccctcatgaccatcatggaagattactttgcgtatcgcggcttta

SEQ ID NO: 297 - DNA, 295 bp, Homo sapiens
aaacacaagatgaaaatactctgttctgtccaaagcatcacctaatggtgtgaggcatctcacttagctgtggagaagtccttggaattagatctcagaaagacagctttaagacagtaaaaccttttggcaatgggctaattgccttaaaagaagagttctacctgaaagaccttgcaggtggagaaattgtcctacaaagattcttggatatgttagtggagataactgacatgggtagctgtgggtcaaccaggaactgtcaacaacctgatctctgcaaaaccaggatgga

SEQ ID NO: 298 - DNA, 347 bp, Homo sapiens
ccaaaataaagcttcaggcaagaggcaaagatccagtggaatatgggagaatggtggaggaccaacacctgctaccccagagagcttttctaaaaaaagcaagaaagcagtcatgagtggtattcaccctgcagaagacacggaaggtactgagtttgagccagagggacttccagaagttgtaaagaaagggtttgctgacatcccgacaggaaagactagcccatatatcctgcgaagaacaaccatggcaactcggaccagcccccgcctggctgcacagaagttagcgctatccccactgagtctcggcaaagaaaatcttgcagagtcctccaaaccaacag

SEQ ID NO: 299 - DNA, 268 bp, Homo sapiens
aaaaagtaaacatgaaaacatcacgaattgtaccatgattcaagaataacttttgtaatagaaaacacatgaccttttgcagtatagtgtgataccgaagtaaaagtgaaagaaataaatgcaggaaagtttaagtggatgtaagtttttataaggaaagtaataagaggaggctgcttttgaaggtcctttgatcttccatgatgataatatcgttgcaaagttctttaacttgtattcaagtaattagcagttgaccacttggttt

SEQ ID NO: 300 - DNA, 185 bp, Homo sapiens
aaattggagaaggaagttttcctgaagagccagaatccttgctaagtcatttagatccaactgaccatctttatttctgtcaaaaatcttcatcatggtgccggtgtattcttccagtttagcctcagaaatggcctttctgtggtgaagaaagaggtctcggaggaagttgcggagctcagcag

SEQ ID NO: 301 - DNA, 75 bp, Homo sapiens
aaaattggaaagtgggataagaaatctaaagtaaccagcttatctttgaaacaatattattttgaaattggcttt

SEQ ID NO: 302 - DNA, 247 bp, Homo sapiens
  misc_feature 159, 188, 212: n = A,T,C or G
ccatgttctctgaattgggtgcagaagacaagggcagagtggctgcggcccctattacctttgtagcagccacatcagaaagcagaagaaaacagtatttctgaaggcattgtttgaggttgatctcagcactgaacgatttcaagccctacgcaccanaacagaaggagggtggaggaagtgatcanagggaacgagctgtaggtttgcanaaatgtgtgaaaccaaaatgatcactgcctacttg

SEQ ID NO: 303 - DNA, 535 bp, Homo sapiens
ctgcttcagaggaaatcactgaaaaataaagaaaaaccatccatgcatggctgcatccagtgtacctgtaatcctgaagaaaaggtcctaattccttccatgctgaaatgctagctttggtttcagagagagactttattgcaactgtgaccaccgtcactggtgagcactgctgttcggcccccagcggacttaaaagactggaatgtggtagtggcggtcgttctcggtcagcagggagatctccggccagtccctgagaggctcctctgggtagcagacttcaaagtctctggagttaaacttgaacagtctgaacacttttatctttacttcaagggagtatccaagtataaacatatcaatctgctctagtccacatgtgtcgcctacagaattcaggtgattcatcatgaagctcaaaggatcagaggatgtctccctggaaaacaggagtctaaaaagactgggaatgacctttttagtcttcatttgttcataaacttcagtgacttgatacagcatgatgaacttt

SEQ ID NO: 304 - DNA, 522 bp, Homo sapiens
ccgcgctcggtctacaatcacgttttattattggctcgtctagtcatgggatagagaaggtaaatagcaaaatagaaagaaaagggggaaaaggtagaaggcaaggggaaaactattggttttagatctttatcctggtcctgtcaatgatcaggtaattggaaggatcaaaattaggccaaacttggtaattgggccaaaattgaaccaaagtttgtgtcaagaagacctggggcagagatatgtgactaaatcatttggaatatgcccagaccccaagaatatttatgcccaacttgaatgctaaccagaagtcccttactgtagaagattgtaaggttgctatttttttgccccgacaccaaaatattgatgtattttccaacaccaattctccaattctctgacaccaactcgatgttcaacaattcagttatattctgtcactaattcctgcagctatcagcaggccccacaggtaaaggattcagtctcacaagattgcccccccacccacttcag

SEQ ID NO: 305 - DNA, 165 bp, Homo sapiens
cctaaagcgctcctcgctgaagctcaaggggtccacaatgatttgtttgtcaaagttattgagtgcatatgccagttctcctcctcctccaccctggtgctgtgaggcatcgtctgaggcagtggcctgggctgcattggaaatgcctgtgaccgcctgctgcag

SEQ ID NO: 306 - DNA, 294 bp, Homo sapiens
ctgcacctaagacatggccctggctaggcgggaacagctcacagtagcgatacattcacaggacacagttggtgtccagaaaagggggctcagaacacagtttctacacaagcacttggcacccacacgacagagacgtcactcaagcagcacagccacaaatagtttacagcagctcatgcccggcatccgcccatgctgggagactccctgaaaggtgggcacctgccgtctatgaggaggtgtctccctccatcattaaccccaaaccacacaatgtgtgaggagagcagg

SEQ ID NO: 307 - DNA, 181 bp, Homo sapiens
aaaaatccatgacaccttgatagaaattagagtttacacaaacaaaaaaggaaccttcgatattgccagcagctataaagtgaacgtactgagaccgacaggacagcaagaaggcatttgcacatttatatctgacacccgaccatactttcagtcaccagaatatcttctctccagattt

SEQ ID NO: 308 - DNA, 179 bp, Homo sapiens
  misc_feature 138: n = A,T,C or G
aaggctgaggactgctgggagctcagatcagcccggagctactggctcatgggcagccaaaaaatactggatctgctgaacgaaggctcagcccgagatctccgcagtcttcagcgcattggcccgaagaaggcccanctaatcgtgggctggcgggagctccacggccccttcagcca

SEQ ID NO: 309 - DNA, 129 bp, Homo sapiens
  misc_feature 28: n = A,T,C or G
ctgcccgcttgcccgtagctgactcagnttcctcatcttcatctccatcctcttcctcaccatcaccttcttcttcctcctcctcttcctccccaccttcttcctcttcttcgtctacctcattgtcag

SEQ ID NO: 310 - DNA, 390 bp, Homo sapiens
tgaggctgggggagagccgtggtccctgaggatgggtcagagctaaactccttcctggcctgagagtcagctctctgccctgtgtacttcccgggccagggctgcccctaatctctgtaggaaccgtggtatgtctgcatgttgcccctttctcttttcccctttcctgtcccaccatacgagcacctccagcctgaacagaagctcttactctttcctatttcagtgttacctgtgtgcttggtctgtttgactttacgcccatctcaggacacttccgtagactgtttaggttcccctgtcaaatatcagttacccactcggtcccagttttgttgccccagaaagggatgttattatccttgggggctcccagggcaagggttaagg

SEQ ID NO: 311 - DNA, 355 bp, Homo sapiens
  misc_feature 127, 131, 154, 156, 192, 204, 227, 242, 271, 274, 297: n = A,T,C or G
cctctctgtgctgctgaaggcagatcgcttgttccacaccagctaccactcccaggcagtgcatatccgcctgttgagaaatgccgtgtctagattgtggacaagagcctgcgtgattatgctatangganaaaaattcttcgagttccacccnanctcctctaaacatttggctcactcaaaacaaaaagncaccaatcttantactgctgaacttcatttatgtnacctaacattaaccntcgtaggaaaaccaaatagccctctcgtncangatatgttgctaaaggactaccntgttcaacacaacggctccggtgtgtgaactcctgtttgggtgattcccctactctca

SEQ ID NO: 312 - DNA, 498 bp, Homo sapiens
ccattcttttgaatctaatctattatcaatagcatcctccataatatctttgataaaaggtgtccaccgagagagctgaaaagtttcttctgcagaccgatcctttcttaacggtttgccttgttgagattggggaacaatgggaacaccaaggtaactccagttacgaatcatgtcactctcattttctatctttacattctggatcaacctgtccaaattttcttccgtagttccattaatactgaagatataaagtagaattgctcttattttatcacaattatcatgatttttgttgagtagaactggaaggagtactcgcatggaatctttcaccttctgtccttctgcatcagttccaagtgccaggtcctgttcagttttgcagagcttttctatattaagcttgaacttattcatgcaatcttctgctaagttaagatggacaacttgcttagtaatctgttttcggaaatagggcatctttttcatcag

SEQ ID NO: 313 - DNA, 653 bp, Homo sapiens
aaacttatcagatttttttaagttaggtaatttcaatccacagtggctccatatggttaaaaaaacaaaaacaaaaacgcatttaaggatacacgaagcagtgaaaacaaagccccagtattttcgctaaagtactggaaatacctgtttctaaaaacagctttatatttgtccactgcctagaatagctctcacccaaacctcaaaaataagagcagatagattttagaagcaagaaaaggtaaacagtgcccatattatttgagactggctctgctgccctccctaagccagtttacattctttgagattcttggagtgggtgagtcagggctgaagactgcacaggccatgtcccctgctccaactattcctcagaacgtcccaggtggagggagtggcctgtcgattttcactcattccatggagctctgtgtacatgaaaattcctccaagtgtggcttttgtcgaattcagagatacagcaagccacgcataaaacatggagtgtagagcactggtgtacctagcttagaaacaccctcggtgaatgtggtactgtggctcgaaaggaagcaagggacaggacccaggagactgggcggccaggctctcggagttccacacacacctgtgaagcccggccagcacag

SEQ ID NO: 314 - DNA, 513 bp, Homo sapiens
ctggaagattttgctgcatttggcattatactgtaatttacagtatacaacatctggggactcagtactatcttagcacagactaacttctcccactccgtcagaggtggcaggtggcgggtcggtggggagggccttttctccccataaatgcctgaactttaatttataccatataagaaatcagtgaaaggtaaacaacaaggttaatgtaactctattataaattttgcattttttttctctgtgacatatacaagtatatttttgtttttggagctataaattatttaatttagcaatcttcaaagctcataaatttcaacttttcaaataagaaattttaacttcaaataagaagtctaggactttatggctattaattttactatcaaaatatccaagggactccattcaatgtaatagttataattcttctaaatatcatttgaataattctttgtggacgctagactcaagactatgctacatccaaacagtacatctataacc

SEQ ID NO: 315 - DNA, 222 bp, Homo sapiens
  misc_feature 15: n = A,T,C or G
atttatattcaaggnatctcaaagaaagcattttcatttcactgcacatctagagaaaaacaaaaatagaaaattttctagtccatcctaatctgaatggtgctgtttctatattggtcattgccttgcaaacaggagctccacaaaagccaggaagagagactgcctccttggctgaaagagtcctttcaggaaggtggactgcattggtttgatatgttt

SEQ ID NO: 316 - DNA, 1633 bp, Homo sapiens
cgtggaggcagctagcgcgaggctggggagcgctgagccgcgcgtcgtgccctgcgctgcccagactagcgaacaatacagtcgggatggctaaaggtgaccccaagaaaccaaagggcaagacgtccgcttatgccttctttgtgcagacatgcagagaagaacataagaagaaaaacccagaggtccctgtcaattttgcggaattttccaagaagtgctctgagaggtggaagacggtgtccgggaaagagaaatccaaatttgatgaaatggcaaaggcagataaagtgcgctatgatcgggaaatgaaggattatggaccagctaagggaggcaagaagaagaaggatcctaatgctcccaaaaggccaccgtctggattcttcctgttctgttcagaattccgccccaagatcaaatccacaaaccccggcatctctattggagacgtggcaaaaaagctgggtgagatgtggaataatttaaatgacagtgaaaagcagccttacatcactaaggcggcaaagctgaaggagaagtatgagaaggatgttgctgactataagtcgaaaggaaagtttgatggtgcaaagggtcctgctaaagttgcccggaaaaaggtggaagaggaagatgaagaacaggaggaggaagaagaggaggaggaggaggaggaggatgaataaagaaactgtttatctgtctccttgtgaatacttagagtaggggagcgccgtaattgacacatctcttatttgagaagtgtctgttgccctcattaggtttaattacaaaatttgatcacgatcatattgtagtctctcaaagtgctctagaaattgtcagtggtttacatgaagtggccatgggtgtctggagcaccctgaaactgtatcaaagttgtacatatttccaaacatttttaaaatgaaaaggcactctcgtgttctcctcactctgtgcactttgctgttggtgtgacaaggcatttaaagatgtttctggcattttctttttatttgtaaggtggtggtaactatggttattggctagaaatcctgagttttcaactgtatatatctatagtttgtaaaaagaacaaaacaaccgagacaaacccttgatgctccttgctcggcgttgaggctgtggggaagatgccttttgggagaggctgtagctcagggcgtgcactgtgaggctggacctgttgactctgcagggggcatccatttagcttcaggttgtcttgtttctgtatatagtgacatagcattctgctgccatcttagctgtggacaaaggggggtcagctggcatgagaatatttttttttaagtgcggtagtttttaaactgtttgtttttaaacaaactatagaactcttcattgtcagcaaagcaaagagtcactgcatcaatgaaagttcaagaacctcctgtacttaaacacgattcgcaacgttctgttattttttttgtatgtttagaatgctgaaatgtttttgaagttaaataaacagtattacatttttagaactcttctctactataacagtcaatttctgactcacagcagtgaacaaacccccactccgttgtatttggagactggcctccctataaatgtg

SEQ ID NO: 317 - DNA, 4235 bp, Homo sapiens
gaatccaagggggccagttcctgccgtctgctcttctgcctcttgatctccgccaccgtcttcaggccaggccttggatggtatactgtaaattcagcatatggagataccattatcataccttgccgacttgacgtacctcagaatctcatgtttggcaaatggaaatatgaaaagcccgatggctccccagtatttattgccttcagatcctctacaaagaaaagtgtgcagtacgacgatgtaccagaatacaaagacagattgaacctctcagaaaactacactttgtctatcagtaatgcaaggatcagtgatgaaaagagatttgtgtgcatgctagtaactgaggacaacgtgtttgaggcacctacaatagtcaaggtgttcaagcaaccatctaaacctgaaattgtaagcaaagcactgtttctcgaaacagagcagctaaaaaagttgggtgactgcatttcagaagacagttatccagatggcaatatcacatggtacaggaatggaaaagtgctacatccccttgaaggagcggtggtcataatttttaaaaaggaaatggacccagtgactcagctctataccatgacttccaccctggagtacaagacaaccaaggctgacatacaaatgccattcacctgctcggtgacatattatggaccatctggccagaaaacaattcattctgaacaggcagtatttgatatttactatcctacagagcaggtgacaatacaagtgctgccaccaaaaaatgccatcaaagaaggggataacatcactcttaaatgcttagggaatggcaaccctcccccagaggaatttttgttttacttaccaggacagcccgaaggaataagaagctcaaatacttacacactgacggatgtgaggcgcaatgcaacaggagactacaagtgttccctgatagacaaaaaaagcatgattgcttcaacagccatcacagttcactatttggatttgtccttaaacccaagtggagaagtgactagacagattggtgatgccctacccgtgtcatgcacaatatctgctagcaggaatgcaactgtggtatggatgaaagataacatcaggcttcgatctagcccgtcattttctagtcttcattatcaggatgctggaaactatgtctgcgaaactgctctgcaggaggttgaaggactaaagaaaagagagtcattgactctcattgtagaaggcaaacctcaaataaaaatgacaaagaaaactgatcccagtggactatctaaaacaataatctgccatgtggaaggttttccaaagccagccattcagtggacaattactggcagtggaagcgtcataaaccaaacagaggaatctccttatattaatggcaggtattatagtaaaattatcatttcccctgaagagaatgttacattaacttgcacagcagaaaaccaactggagagaacagtaaactccttgaatgtctctgctataagtattccagaacacgatgaggcagacgagataagtgatgaaaacagagaaaaggtgaatgaccaggcaaaactaattgtgggaatcgttgttggtctcctccttgctgcccttgttgctggtgtcgtctactggctgtacatgaagaagtcaaagactgcatcaaaacatgtaaacaaggacctcggtaatatggaagaaaacaaaaagttagaagaaaacaatcacaaaactgaagcctaagagagaaactgtcctagttgtccagagataaaaatcatatagaccaattgaagcatgaacgtggattgtatttaagacataaacaaagacattgacagcaattcatgttcaagtattaagcagttcattctaccaagctgtcacaggttttcagagaattatctcaagtaaaacaaatgaaatttaattacaaacaataagaacaagttttggcagccatgataataggtcatatgttgtgtttggttcaattttttttccgtaaatgtctgcactgaggatttctttttggtttgccttttatgtaaattttttacgtagctatttttatacactgtaagctttgttctgggagttgctgttaatctgatgtataatgtaatgtttttatttcaattgtttatatggataatctgagcaggtacatttctgattctgattgctatcagcaatgccccaaactttctcataagcacctaaaacccaaaggtggcagcttgtgaagattggggacactcatattgccctaattaaaaactgtgatttttatcacaagggaggggaggccgagagtcagactgatagacaccataggagccgactctttgatatgccaccagcgaactctcagaaataaatcacagatgcatatagacacacatacataatggtactcccaaactgacaattttacctattctgaaaaagacataaaacagaatttggtagcacttacctctacagacacctgctaataaattattttctgtcaaaagaaaaaacacaagcatgtgtgagagacagtttggaaaaatcatggtcaacattcccattttcatagatcacaatgtaaatcactataattacaaattggtgttaaatcctttgggttatccactgccttaaaattatacctatttcatgtttaaaaagatatcaatcagaattggagtttttaacagtggtcattatcaaagctgtgttattttccacagaatatagaatatatatttttttcgtgtgtgtttttgttaactaccctacagatattgaatgcaccttgagataatttagtgttttaactgatacataatttatcaagcagtacatgaaagtgtaataataaaatgtctatgtatctttagttacattcaaatttgtaactttataaacatgttttatgcttgaggaaatttttaaggtggtagtataaatggaaactttttgaagtagaccagatatgggctacttgtgactagacttttaaactttgctctttcaagcagaagcctggtttctgggagaacactgcacagtgatttctttcccaggatttacacaactttaaagggaagataaatgaacatcagatttctaggtatagaactatgttattgaaaggaaaaggaaaactggtgtttgtttcttagactcatgaaataaaaaattatgaaggcaatgaaaaataaattgaaaattaaagtcagatgagaataggaataatactttgccacttctgcattatttagaaacatacgttattgtacatttgtaaaccatttactgtctgggcaatagtgactccgtttaataaaagcttccgtagtgcattggtatggattaaatgcataaaatatcttagactcgatgctgtataaaatattatgggaaaaaagaaatacgttattttgcctctaaacttttattgaagttttatttggcaggaaaaaaaattgaatcttggtcaacatttaaaccaaagtaaaaggggaaaaaccaaagttatttgttttgcatggctaagccattctgttatctctgtaaatactgtgatttcttttttattttctctttagaattttgttaaagaaattctaaaatttttaaacacctgctctccacaataaatcacaaacactaaaataaaattacttccatataaatattattttctcttttggtgtgggagatcaaaggtttaaagtctaacttctaagatatatttgcagaaagaagcaacatgacaatagagagagttatgctacattatttcttggtttccacttgcaatggttaattaagtccaaaaacagctgtcagaacctcgagagcagaacatgagaaactcagagctctggaccgaaagcagaaagtttgccggaaaaaaaaagaccacattattaccatcgattcagtgcctggataaagaggaaagcttacttgtttaatggcagccacatgcacgaagatgctaagaagaaaaagaattccaaatcctcaacttttgaggtttcggctctccaatttaactctttggcaacaggaaacaggttttgcaagttcaaggttcactccctatatgtgattataggaattgtttgtggaaatggattaacatacccgtctatgcctaaaagataataagaaaactgaaatatgtcttcaaaaaaaaaaaaaaaaaaaaaaaaaaaaaaaaaaaaaaaaaa

SEQ ID NO: 318 - DNA, 3347 bp, Homo sapiens
atcccttggaggcattcatggctgaagtggaggatcaggcagctagagacatgaagaggcttgaagaaaaggacaaggaaagaaaaaacgtaaagggtattcgagatgacattgaagaggaagatgaccaagaagcttattttcgatacatggcagaaaacccaactgctggtgtggttcaggaggaagaggaagacaatctagaatatgatagtgacggaaatccaattgcacctaccaaaaaaatcattgatcctcttccccccattgatcattcagagattgactatccaccatttgaaaaaaacttttacaatgagcatgaagagataaccaacctcactccacagcagttaatagatctccggcataagctcaatcttcgggtctctggtgctgcacctcctagaccaggaagtagctttgctcattttgggtttgacgaacaacttatgcaccagattcggaaatctgaatacacacagcccactccaatacagtgccagggtgtgcctgtggcattaagtggtagagacatgattggtattgccaaaacaggtagtgggaaaactgcagccttcatttggcccatgttgattcatataatggaccagaaggagttggaaccaggtgatggaccaattgcagtgattgtgtgtcctaccagggagctttgccagcagatccatgcagaatgtaagcggtttggaaaagcatataatcttcgatcagtggccgtatatggaggagggagtatgtgggagcaggccaaggcccttcaggagggggcagagattgttgtgtgtaccccaggtcgactgatagatcatgtgaaaaagaaagctaccaatcttcaaagagtctcttaccttgtgtttgatgaagcagatcgaatgtttgacatgggatttgagtaccaagttcgatccatagcaagtcatgttcgtcctgacaggcagactctcttatttagtgcaacttttcggaagaagattgaaaagttggccagagacatcctgatcgaccctattcgagtggtgcagggagatattggagaggcaaatgaagatgtgacacagattgtggagattctccattctggacctagtaaatggaactggcttacccggcgtctggtagaatttacctcttcagggagtgtcctcctctttgttactaaaaaagccaatgctgaagagctagcgaataaccttaaacaggagggtcataatcttgggctgctccatggggatatggatcagagtgagagaaacaaggtcatttcagactttaagaaaaaggacatcccagtcctggtggccacagatgttgcagcccgtggtctggacattccttcaattaagactgtcattaactatgatgtggcacgagacattgatacccacacgcataggattggccgcacaggaagagcgggtgagaaaggtgtggcctataccctactcactcccaaggacagcaattttgctggtgacctggtccggaacttggaaggagccaatcaacacgtttctaaggaactcctagatctggcaatgcagaatgcctggtttcggaaatctcgattcaaaggagggaaaggaaaaaagctgaacattggtggaggaggcctaggctacagggagcggcctggcctgggctctgagaacatggatcgaggaaataacaatgtaatgagcaattatgaggcctacaagccttccacaggagctatgggagatcgactaacggcaatgaaagcagctttccagtcacagtacaagagtcactttgttgcagccagtttaagtaatcagaaggctggaagttctgctgctggggcaagtgggtggactagtgcagggagcttgaattctgttccaactaactcagcacaacagggccataacagtcctgacagccccgtcaccagtgccgccaagggcatcccaggctttggcaatactggcaacatcagtggtgcccctgtgacctacccgtctgccggagcccaaggagtcaacaacacagcttcagggaataacagccgagaagggactgggggcagcaacgggaaaagagagagatatactgagaaccggggcagcagcccgtcacagtcacggagagactggcaatcggcatagcgatagtccacgtcacggagatggtggtcgccatggagatggataccgccatccagaaagcagcagccgtcatactgatggccatcggcacggggagaacagacatggaggaagcgcaggccggcatggggagaaccggggtgcaaatgatggtcggaatggggaaagcaggaaagaagcttttaatcgtgagagcaagatggagcccaagatggaacccaaagtggacagcagcaagatggacaaggtggacagcaagacagataagacagctgacggctttgctgtcccagagccgcctaaacgcaagaaaagtcgatgggacagttagaggggatgtgctaaagcgtgaaatcagttgtccttaatttttagaaagattttggtaactaggtgtctcagggctgggttggggtccaaagtgtaaggaccccctgcccttagtggagagctggagcttggagacattaccccttcatcagaaggaattttcggatgttttcttgggaagctgttttggtccttggaagcagtgagagctgggaagcttcttttggctctaggtgagttgtcatgtgggtaagttgaggttatcttgggataaagggtcttctagggcacaaaactcactctaggtttatattgtatgtagcttatattttttactaaggtgtcaccttataagcatctataaattgacttctttttcttagttgtatggccaggcagtccccattttaggagttggcttctgcaaattcaatccattgagctaactgttggggagcaatttggtagttgtagacatttgcagggaagggagatgtctgattctaaatgggagttgatgctcaggtccccagccaggtttgcatccagccctgagacatgtaggaaacacctttcagacccaggctctgaagattcccagaagccacaaggattgaagggaaaaggtgatcctggtaactgttccaggattgctccaggtttgagatggtattgctaaatttaaaattaaacaagaaacccaacaacagcttttaaagtgtcttctatctcattgtattttttttaacttgccccaatgatagaaaagtcttttgctgaaatgattttgatgatttttgtttatcgtttataaaaaggaaaagaaatatacaaactttgacttttgtgaaaaaaaaaaaaaaaaaaaaa

SEQ ID NO: 319 - DNA, 1814 bp, Homo sapiens
ggggagatgatccgagccgcgccgccgccgctgttcctgctgctgctgctgctgctgctgctagtgtcctgggcgtcccgaggcgaggcagcccccgaccaggacgagatccagcgcctccccgggctggccaagcagccgtctttccgccagtactccggctacctcaaaagctccggctccaagcacctccactactggtttgtggagtcccagaaggatcccgagaacagccctgtggtgctttggctcaatgggggtcccggctgcagctcactagatgggctcctcacagagcatggccccttcctggtccagccagatggtgtcaccctggagtacaacccctattcttggaatctgattgccaatgtgttatacctggagtccccagctggggtgggcttctcctactccgatgacaagttttatgcaactaatgacactgaggtcgcccagagcaattttgaggcccttcaagatttcttccgcctctttccggagtacaagaacaacaaacttttcctgaccggggagagctatgctggcatctacatccccaccctggccgtgctggtcatgcaggatcccagcatgaaccttcaggggctggctgtgggcaatggactctcctcctatgagcagaatgacaactccctggtctactttgcctactaccatggccttctggggaacaggctttggtcttctctccagacccactgctgctctcaaaacaagtgtaacttctatgacaacaaagacctggaatgcgtgaccaatcttcaggaagtggcccgcatcgtgggcaactctggcctcaacatctacaatctctatgccccgtgtgctggaggggtgcccagccattttaggtatgagaaggacactgttgtggtccaggatttgggcaacatcttcactcgcctgccactcaagcggatgtggcatcaggcactgctgcgctcaggggataaagtgcgcatggaccccccctgcaccaacacaacagctgcttccacctacctcaacaacccgtacgtgcggaaggccctcaacatcccggagcagctgccacaatgggacatgtgcaactttctggtaaacttacagtaccgccgtctctaccgaagcatgaactcccagtatctgaagctgcttagctcacagaaataccagatcctattatataatggagatgtagacatggcctgcaatttcatgggggatgagtggtttgtggattccctcaaccagaagatggaggtgcagcgccggccctggttagtgaagtacggggacagcggggagcagattgccggcttcgtgaaggagttctcccacatcgcctttctcacgatcaagggcgccggccacatggttcccaccgacaagcccctcgctgccttcaccatgttctcccgcttcctgaacaagcagccatactgatgaccacagcaaccagctccacggcctgatgcagcccctcccagcctctcccgctaggagagtcctcttctaagcaaagtgcccctgcaggcgggttctgccgccaggactgcccccttcccagagccctgtacatcccagactgggcccagggtctcccatagacagcctgggggcaagttagcactttattcccgcagcagttcctgaatggggtggcctggccccttctctgcttaaagaatgccctttatgatgcactgattccatcccaggaacccaacagagctcaggacagcccacagggaggtggtggacggactgtaattgatagattgattatggaattaaattgggtacagctt

SEQ ID NO: 320 - DNA, 3132 bp, Homo sapiens
ccgcagaacttggggagccgccgccgccatccgccgccgcagccagcttccgccgccgcaggaccggcccctgccccagcctccgcagccgcggcgcgtccacgcccgcccgcgcccagggcgagtcggggtcgccgcctgcacgcttctcagtgttccccgcgccccgcatgtaacccggccaggcccccgcaacggtgtcccctgcagctccagccccgggctgcacccccccgccccgacaccagctctccagcctgctcgtccaggatggccgcggccaaggccgagatgcagctgatgtccccgctgcagatctctgacccgttcggatcctttcctcactcgcccaccatggacaactaccctaagctggaggagatgatgctgctgagcaacggggctccccagttcctcggcgccgccggggccccagagggcagcggcagcaacagcagcagcagcagcagcgggggcggtggaggcggcgggggcggcagcaacagcagcagcagcagcagcaccttcaaccctcaggcggacacgggcgagcagccctacgagcacctgaccgcagagtcttttcctgacatctctctgaacaacgagaaggtgctggtggagaccagttaccccagccaaaccactcgactgccccccatcacctatactggccgcttttccctggagcctgcacccaacagtggcaacaccttgtggcccgagcccctcttcagcttggtcagtggcctagtgagcatgaccaacccaccggcctcctcgtcctcagcaccatctccagcggcctcctccgcctccgcctcccagagcccacccctgagctgcgcagtgccatccaacgacagcagtcccatttactcagcggcacccaccttccccacgccgaacactgacattttccctgagccacaaagccaggccttcccgggctcggcagggacagcgctccagtacccgcctcctgcctaccctgccgccaagggtggcttccaggttcccatgatccccgactacctgtttccacagcagcagggggatctgggcctgggcaccccagaccagaagcccttccagggcctggagagccgcacccagcagccttcgctaacccctctgtctactattaaggcctttgccactcagtcgggctcccaggacctgaaggccctcaataccagctaccagtcccagctcatcaaacccagccgcatgcgcaagtatcccaaccggcccagcaagacgcccccccacgaacgcccttacgcttgcccagtggagtcctgtgatcgccgcttctcccgctccgacgagctcacccgccacatccgcatccacacaggccagaagcccttccagtgccgcatctgcatgcgcaacttcagccgcagcgaccacctcaccacccacatccgcacccacacaggcgaaaagcccttcgcctgcgacatctgtggaagaaagtttgccaggagcgatgaacgcaagaggcataccaagatccacttgcggcagaaggacaagaaagcagacaaaagtgttgtggcctcttcggccacctcctctctctcttcctacccgtccccggttgctacctcttacccgtccccggttactacctcttatccatccccggccaccacctcatacccatcccctgtgcccacctccttctcctctcccggctcctcgacctacccatcccctgtgcacagtggcttcccctccccgtcggtggccaccacgtactcctctgttccccctgctttcccggcccaggtcagcagcttcccttcctcagctgtcaccaactccttcagcgcctccacagggctttcggacatgacagcaaccttttctcccaggacaattgaaatttgctaaagggaaaggggaaagaaagggaaaagggagaaaaagaaacacaagagacttaaaggacaggaggaggagatggccataggagaggagggttcctcttaggtcagatggaggttctcagagccaagtcctccctctctactggagtggaaggtctattggccaacaatcctttctgcccacttccccttccccaattactattccctttgacttcagctgcctgaaacagccatgtccaagttcttcacctctatccaaagaacttgatttgcatggattttggataaatcatttcagtatcatctccatcatatgcctgaccccttgctcccttcaatgctagaaaatcgagttggcaaaatggggtttgggcccctcagagccctgccctgcacccttgtacagtgtctgtgccatggatttcgtttttcttggggtactcttgatgtgaagataatttgcatattctattgtattatttggagttaggtcctcacttgggggaaaaaaaaaaaaaaaagccaagcaaaccaatggtgatcctctattttgtgatgatgctgtgacaataagtttgaacctttttttttgaaacagcagtcccagtattctcagagcatgtgtcagagtgttgttccgttaacctttttgtaaatactgcttgaccgtactctcacatgtggcaaaatatggtttggtttttcttttttttttttgaaagtgttttttcttcgtccttttggtttaaaaagtttcacgtcttggtgccttttgtgtgatgccccttgctgatggcttgacatgtgcaattgtgagggacatgctcacctctagccttaaggggggcagggagtgatgatttgggggaggctttgggagcaaaataaggaagagggctgagctgagcttcggttctccagaatgtaagaaaacaaaatctaaaacaaaatctgaactctcaaaagtctatttttttaactgaaaatgtaaatttataaatatattcaggagttggaatgttgtagttacctactgagtaggcggcgatttttgtatgttatgaacatgcagttcattattttgtggttctattttactttgtacttgtgtttgcttaaacaaagtgactgtttggcttataaacacattgaatgcgctttattgcccatgggatatgtggtgtatatccttccaaaaaattaaaacgaaaataaagtagctgcgattggg

SEQ ID NO: 321 - DNA, 2280 bp, Homo sapiens
ccgcccgccaccagctacgccccgtccgacgtgccctcgggggtcgcgctgttcctcaccatccctttcgccttcttcctgcccgagctgatatttgggttcttggtctggaccatggtagccgccacccacatagtataccccttgctgcaaggatgggtgatgtatgtctcgctcacctcgtttctcatctccttgatgttcctgttgtcttacttgtttggattttacaaaagatttgaatcctggagagttctggacagcctgtaccacgggaccactggcatcctgtacatgagcgctgccgtcctacaagtacatgccacgattgtttctgagaaactgctggacccaagaatttactacattaattcggcagcctcgttcttcgccttcatcgccacgctgctctacattctccatgccttcagcatctattaccactgatgcacaggcgccaggccaagggggaaatgctctttgaaagctccaattattggtccccaaaagcagcttccaacgtttgccatctggatgacaaacggaagatccactaaaacgtccacgggattaacagaacgtccttgcagactgagcgatgacaccacactttgtttggacatttaaattcactctgctgaataggaggaagcttttctttttcctgggaaaacaactgtctcttggaattatctgaccatgaacttgctcttctagacaactcacatcaaagccctcactccactaatggagaatcctagccccactaatgccaagtctgtttggggattttgcctcagctatgggcttccctagagtaggtctaggggaatactcagtctgatcttttttttgtttgttttattttgttttttttgagacggagtctcgctcttcctccaaggctggagtgcagtgacgcgatctccactcactgcaggctccgcctcccgggttcccgccattctcctgcctcagcctcccgagtagccgggactacaggcgcccaccaccatgcccggctaatttagttgtatttttagtagagatggggtttcaccgtattagccaggatggtctcgatctcctgacctcgtgatccgcccgcctcggcctcccaaagtgctgggattacaggcgtgagccaccgtgcccggcctgattctcttaaaattgaagaggtgctgccaaggccttcagatctaacgcagatgcatagaccttgttcctggtacttgttcagcctgtgctggggagccgtggtcccgagttccctgggaggctgacagggtcaagccaccctgcccaccaccctcccacttcccctcccctttcctctccagcattaggattcaagggaaatctgcatgaagccaattttgagggtagacgtgtggggaaaataaatcattatacagtaagacctggggcttgaggggtggggaatggggagggaagggcatagcctgctcctccatgagtctgacatctcggaaactgagcagctgccggacgcctgggtcaggaatccaagaccccacctcttaaggactggttcctcagaaagcaccctcagggaaaaaggtgaaaacattacatccgtggattctcctgccacaaccgcattggaagaaaaggctgccgcaacatctcagcgaggagtgaaggacccatgtcccaggaaccgcgctgcgccacctgcactcacccccctcacattctcttaagcacccggtggccctccgaggctggcggaatggtggtgcccacggggttgggcaagggctcaccaggacctcaacgggcaaagttgtgcacactaaaatatcaaatcaaggtgcttggttttaaagtaaatgtttttctaaagaaagctgtgttcttctgttgacccagacgaatagggcacagccctgtaactgcacgtgccttctgtcattgggaatgaaataaattattacgagaaagggacttgtcctaactggtttgaggccttacagttttgtatctacatttttcccctcctggggtttgcggggacagggacagaactacaggagtcatgggaaagaaaattctggcttcactactgctcactgctcactttctgatcactctgatactttttttttttttttttttttgcaacctgataccttgaaaagcttctatgtgtctctccttttgttgcctggcagctgtctaggatgatcactgattactatttactaagtagccacatgcaaataaaagttgtttggtaaaatggaaaaaaaaaaa

SEQ ID NO: 322 - DNA, 1398 bp, Homo sapiens
tagatggcaacctccctatctgcccgcaggtcatagaggcgacacgtagcgtcatctgaccctgaagcaaaggcatctccactccaaagttagacaaaatgccaggaatgttcttctctgctaacccaaaggaattgaaaggaaccactcattcacttctagacgacaaaatgcaaaaaaggaggccaaagacttttggaatggatatgaaagcatacctgagatctatgatcccacatctggaatctggaatgaaatcttccaagtccaaggatgtactttctgctgctgaagtaatgcaatggtctcaatctctggaaaaacttcttgccaaccaaactggtcaaaatgtctttggaagtttcctaaagtctgaattcagtgaggagaatattgagttctggctggcttgtgaagactataagaaaacagagtctgatcttttgccctgtaaagcagaagagatatataaagcatttgtgcattcagatgctgctaaacaaatcaatattgacttccgcactcgagaatctacagccaagaagattaaagcaccaacccccacgtgttttgatgaagcacaaaaagtcatatatactcttatggaaaaggactcttatcccaggttcctcaaatcagatatttacttaaatcttctaaatgacctgcaggctaatagcctaaagtgactggtccctggctgaagggaattaacagatagtatcaaggcacgaaggaatgtgccagtatggctccctgggtgaacagcttggccttttttgggtgtcttgacaggccaagaagaacaaatgactcagaatggattaacatgaaagttatccaggcgcagagttgaagaagcataagcaagacaaaaacagagagaccgcagaaggaggaagatactgtggtactgtcataaaaaacagtggagctctgtattagaaagcccctcagaactgggaaggccaggtaactctagttacacagaaactgtgactaaagtctatgaaactgattacaacaggctgtaagaatcaaagtcaactgacatctatgctacatattattatatagtttgtactgagctattgaagtcccattaacttaaagtatatgttttcaaattgccattgctactattgcttgtcggtgtattttattttattgtttttgactttggaagagatgaactgtgtatttaacttaagctattgctcttaaaaccagggatcagaatatatttgtaagttaaatcattggtgctaataataaatgtggattttgtattaaaatatatagaagcaatttctgtttacatgtccttgctacttttaaaaacttgcatttattcctcagattttaaaaataaataaataattcatttaaaaaaaaaaa

SEQ ID NO: 323 - DNA, 1316 bp, Homo sapiens
acttctacctgctcactcagaatcatttctgcaccaaccatggccacgtttgtggagctcagtaccaaagccaagatgcccattgtgggcctgggcacttggaagtctcctcttggcaaagtgaaagaagcagtgaaggtggccattgatgcaggatatcggcacattgactgtgcctatgtctatcagaatgaacatgaagtgggggaagccatccaagagaagatccaagagaaggctgtgaagcgggaggacctgttcatcgtcagcaagttgtggcccactttctttgagagaccccttgtgaggaaagcctttgagaagaccctcaaggacctgaagctgagctatctggacgtctatcttattcactggccacagggattcaagtctggggatgaccttttccccaaagatgataaaggtaatgccatcggtggaaaagcaacgttcttggatgcctgggaggccatggaggagctggtggatgaggggctggtgaaagcccttggggtctccaatttcagccacttccagatcgagaagctcttgaacaaacctggactgaaatataaaccagtgactaaccaggttgagtgtcacccatacctcacacaggagaaactgatccagtactgccactccaagggcatcaccgttacggcctacagccccctgggctctccggatagaccttgggccaagccagaagacccttccctgctggaggatcccaagattaaggagattgctgcaaagcacaaaaaaaccgcagcccaggttctgatccgtttccatatccagaggaatgtgattgtcatccccaagtctgtgacaccagcacgcattgttgagaacattcaggtctttgactttaaattgagtgatgaggagatggcaaccatactcagcttcaacagaaactggagggcctgtaacgtgttgcaatcctctcatttggaagactatcccttcaatgcagaatattgaggttgaatctcctggtgagattatacaggagattctctttcttcgctgaagtgtgactacctccactcatgtcccattttagccaagcttatttaagatcacagtgaacttagtcctgttatagacgagaatcgaggtgctgttttagacatttatttctgtatgttcaactaggatcagaatatcacagaaaagcatggcttgaataaggaaatgacaattttttccacttatctgatcagaacaaatgtttattaagcatcagaaactctgccaacactgaggatgtaaagatcaataaaacaaataataatcataaaaaaaaa

SEQ ID NO: 324 - protein, 200 aa, Homo sapiens
MAKGDPKKPKGKTSAYAFFVQTCREEHKKKNPEVPVNFAEFSKKCSERWKTVSGKEKSKFDEMAKADKVRYDREMKDYGPAKGGKKKKDPNAPKRPPSGFFLFCSEFRPKIKSTNPGISIGDVAKKLGEMWNNLNDSEKQPYITKAAKLKEKYEKDVADYKSKGKFDGAKGPAKVARKKVEEEDEEQEEEEEEEEEEEDE

SEQ ID NO: 325 - protein, 263 aa, Homo sapiens
MFRNQYDNDVTVWSPQGRIHQIEYAMEAVKQGSATVGLKSKTHAVLVALKRAQSELAAHQKKILHVDNHIGISIAGLTADARLLCNFMRQECLDSRFVFDRPLPVSRLVSLIGSKTQIPTQRYGRRPYGVGLLIAGYDDMGPHIFQTCPSANYFDCRAMSIGARSQSARTYLERHMSEFMECNLNELVKHGLRALRETLPAEQDLTTKNVSIGIVGKDLEFTIYDDDDVSPFLEGLEERPQRKAQPAQPADEPAEKADEPMEH

SEQ ID NO: 326 - protein, 539 aa, Homo sapiens
MPENVAPRSGATAGAAGGRGKGAYQDRDKPAQIRFSNISAAKAVADAIRTSLGPKGMDKMIQDGKGDVTITNDGATILKQMQVLHPAARMLVELSKAQDIEAGDGTTSVVIIAGSLLDSCTKLLQKGIHPTIISESFQKALEKGIEILTDMSRPVELSDRETLLNSATTSLNSKVVSQYSSLLSPMSVNAVMKVIDPATATSVDLRDIKIVKKLGGTIDDCELVEGLVLTQKVSNSGITRVEKAKIGLIQFCLSAPKTDMDNQIVVSDYAQMDRVLREERAYILNLVKQIKKTGCNVLLIQKSILRDALSDLALHFLNKMKIMVIKDIEREDIEFICKTIGTKPVAHIDQFTADMLGSAELAEEVNLNGSGKLLKITGCASPGKTVTIVVRGSNKLVIEEAERSIHDALCVIRCLVKKRALIAGGGAPEIELALRLTEYSRTLSGMESYCVRAFADAMEVIPSTLAENAGLNPISTVTELRNRHAQGEKTAGINVRKGGISNILEELVVQPLLVSVSALTLATETVRSILKIDDVVNTR

SEQ ID NO: 327 - protein, 144 aa, Homo sapiens
MAFTFAAFCYMLALLLTAALIFFAIWHIIAFDELKTDYKNPIDQCNTLNPLVLPEYLIHAFFCVMFLCAAEWLTLGLNMPLLAYHIWRYMSRPVMSGPGLYDPTTIMNADILAYCQKEGWCKLAFYLLAFFYYLYGMIYVLVSS

SEQ ID NO: 328 - protein, 138 aa, Homo sapiens
MPNFSGNWKIIRSENFEELLKVLGVNVMLRKIAVAAASKPAVEIKQEGDTFYIKTSTTVRTTEINFKVGEEFEEQTVDGRPCKSLVKWESENKMVCEQKLLKGEGPKTSWTRELTNDGELILTMTADDVVCTRVYVRE

SEQ ID NO: 329 - protein, 346 aa, Homo sapiens
MFLSILVALCLWLHLALGVRGAPCEAVRIPMCRHMPWNITRMPNHLHHSTQENAILAIEQYEELVDVNCSAVLRFFFCAMYAPICTLEFLHDPIKPCKSVCQRARDDCEPLMKMYNHSWPESLACDELPVYDRGVCISPEAIVTDLPEDVKWIDITPDMMVQERPLDVDCKRLSPDRCKCKKVKPTLATYLSKNYSYVIHAKIKAVQRSGCNEVTTVVDVKEIFKSSSPIPRTQVPLITNSSCQCPHILPHQDVLIMCYEWRSRMMLLENCLVEKWRDQLSKRSIQWEERLQEQRRTVQDKKKTAGRTSRSNPPKPKGKPPAPKPASPKKNIKTRSAQKRTNPKRV

SEQ ID NO: 330 - protein, 826 aa, Homo sapiens
MEGAGGANDKKKISSERRKEKSRDAARSRRSKESEVFYELAHQLPLPHNVSSHLDKASVMRLTISYLRVRKLLDAGDLDIEDDMKAQMNCFYLKALDGFVMVLTDDGDMIYISDNVNKYMGLTQFELTGHSVFDFTHPCDHEEMREMLTHRNGLVKKGKEQNTQRSFFLRMKCTLTSRGRTMNIKSATWKVLHCTGHIHVYDTNSNQPQCGYKKPPMTCLVLICEPIPHPSNIEIPLDSKTFLSRHSLDMKFSYCDERITELMGYEPEELLGRSIYEYYHALDSDHLTKTHHDMFTKGQVTTGQYRMLAKRGGYVWVETQATVIYNTKNSQPQCIVCVNYVVSGIIQHDLIFSLQQTECVLKPVESSDMKMTQLFTKVESEDTSSLFDKLKKEPDALTLLAPAAGDTIISLDFGSNDTETDDQQLEEVPLYNDVMLPSPNEKLQNINLAMSPLPTAETPKPLRSSADPALNQEVALKLEPNPESLELSFTMPQIQDQTPSPSDGSTRQSSPEPNSPSEYCFYVDSDMVNEFKLELVEKLFAEDTEAKNPFSTQDTDLDLEMLAPYIPMDDDFQLRSFDQLSPLESSSASPESASPQSTVTVFQQTQIQEPTANATTTTATTDELKTVTKDRMEDIKILIASPSPTHIHKETTSATSSPYRDTQSRTASPNRAGKGVIEQTEKSHPRSPNVLSVALSQRTTVPEEELNPKILALQNAQRKRKMEHDGSLFQAVGIGTLLQQPDDHAATTSLSWKRVKGCKSSEQNGMEQKTIILIPSDLACRLLGQSMDESGLPQLTSYDCEVNAPIQGSRNLLQGEELLRALDQVN

SEQ ID NO: 331 - protein, 92 aa, Homo sapiens
MAYRGQGQKVQKVMVQPINLIFRYLQNRSRIQVWLYEQVNMRIEGCIIGFDEYMNLVLDDAEEIHSKTKSRKQLGRIMLKGDNITLLQSVSN

SEQ ID NO: 332 - protein, 235 aa, Homo sapiens
MDPARPLGLSILLLFLTEAALGDAAQEPTGNNAEICLLPLDYGPCRALLLRYYYDRYTQSCRQFLYGGCEGNANNFYTWEACDDACWRIEKVPKVCRLQVSVDDQCEGSTEKYFFNLSSMTCEKFFSGGCHRNRIENRFPDEATCMGFCAPKKIPSFCYSPKDEGLCSANVTRYYFNPRYRTCDAFTYTGCGGNDNNFVSREDCKRACAKALKKKKKMPKLRFASRIRKIRKKQF

SEQ ID NO: 333 - protein, 291 aa, Homo sapiens
MQRARPTLWAAALTLLVLLRGPPVARAGASSGGLGPVVRCEPCDARALAQCAPPPAVCAELVREPGCGCCLTCALSEGQPCGIYTERCGSGLRCQPSPDEARPLQALLDGRGLCVNASAVSRLRAYLLPAPPAPGNASESEEDRSAGSVESPSVSSTHRVSDPKFHPLHSKIIIIKKGHAKDSQRYKVDYESQSTDTQNFSSESKRETEYGPCRREMEDTLNHLKFLNVLSPRGVHIPNCDKKGFYKKKQCRPSKGRKRGFCWCVDKYGQPLPGYTTKGKEDVHCYSMQSK

SEQ ID NO: 334 - protein, 582 aa, Homo sapiens
ESKGASSCRLLFCLLISATVFRPGLGWYTVNSAYGDTIIIPCRLDVPQNLMFGKWKYEKPDGSPVFIAFRSSTKKSVQYDDVPEYKDRLNLSENYTLSISNARISDEKRFVCMLVTEDNVFEAPTIVKVFKQPSKPEIVSKALFLETEQLKKLGDCISEDSYPDGNITWYRNGKVLHPLEGAVVIIFKKEMDPVTQLYTMTSTLEYKTTKADIQMPFTCSVTYYGPSGQKTIHSEQAVFDIYYPTEQVTIQVLPPKNAIKEGDNITLKCLGNGNPPPEEFLFYLPGQPEGIRSSNTYTLTDVRRNATGDYKCSLIDKKSMIASTAITVHYLDLSLNPSGEVTRQIGDALPVSCTISASRNATVVWMKDNIRLRSSPSFSSLHYQDAGNYVCETALQEVEGLKKRESLTLIVEGKPQIKMTKKTDPSGLSKTIICHVEGFPKPAIQWTITGSGSVINQTEESPYINGRYYSKIIISPEENVTLTCTAENQLERTVNSLNVSAISIPEHDEADEISDENREKVNDQAKLIVGIVVGLLLAALVAGVVYWLYMKKSKTASKHVNKDLGNMEENKKLEENNHKTEA

SEQ ID NO: 335 - protein, 709 aa, Homo sapiens
MAEVEDQAARDMKRLEEKDKERKNVKGIRDDIEEEDDQEAYFRYMAENPTAGVVQEEEEDNLEYDSDGNPIAPTKKIIDPLPPIDHSEIDYPPFEKNFYNEHEEITNLTPQQLIDLRHKLNLRVSGAAPPRPGSSFAHFGFDEQLMHQIRKSEYTQPTPIQCQGVPVALSGRDMIGIAKTGSGKTAAFIWPMLIHIMDQKELEPGDGPIAVIVCPTRELCQQIHAECKRFGKAYNLRSVAVYGGGSMWEQAKALQEGAEIVVCTPGRLIDHVKKKATNLQRVSYLVFDEADRMFDMGFEYQVRSIASHVRPDRQTLLFSATFRKKIEKLARDILIDPIRVVQGDIGEANEDVTQIVEILHSGPSKWNWLTRRLVEFTSSGSVLLFVTKKANAEELANNLKQEGHNLGLLHGDMDQSERNKVISDFKKKDIPVLVATDVAARGLDIPSIKTVINYDVARDIDTHTHRIGRTGRAGEKGVAYTLLTPKDSNFAGDLVRNLEGANQHVSKELLDLAMQNAWFRKSRFKGGKGKKLNIGGGGLGYRERPGLGSENMDRGNNNVMSNYEAYKPSTGAMGDRLTAMKAAFQSQYKSHFVAASLSNQKAGSSAAGASGWTSAGSLNSVPTNSAQQGHNSPDSPVTSAAKGIPGFGNTGNISGAPVTYPSAGAQGVNNTASGNNSREGTGGSNGKRERYTENRGSSPSQSRRDWQSA

SEQ ID NO: 336 - protein, 480 aa, Homo sapiens
MIRAAPPPLFLLLLLLLLLVSWASRGEAAPDQDEIQRLPGLAKQPSFRQYSGYLKSSGSKHLHYWFVESQKDPENSPVVLWLNGGPGCSSLDGLLTEHGPFLVQPDGVTLEYNPYSWNLIANVLYLESPAGVGFSYSDDKFYATNDTEVAQSNFEALQDFFRLFPEYKNNKLFLTGESYAGIYIPTLAVLVMQDPSMNLQGLAVGNGLSSYEQNDNSLVYFAYYHGLLGNRLWSSLQTHCCSQNKCNFYDNKDLECVTNLQEVARIVGNSGLNIYNLYAPCAGGVPSHFRYEKDTVVVQDLGNIFTRLPLKRMWHQALLRSGDKVRMDPPCTNTTAASTYLNNPYVRKALNIPEQLPQWDMCNFLVNLQYRRLYRSMNSQYLKLLSSQKYQILLYNGDVDMACNFMGDEWFVDSLNQKMEVQRRPWLVKYGDSGEQIAGFVKEFSHIAFLTIKGAGHMVPTDKPLAAFTMFSRFLNKQPY

SEQ ID NO: 337 - protein, 543 aa, Homo sapiens
MAAAKAEMQLMSPLQISDPFGSFPHSPTMDNYPKLEEMMLLSNGAPQFLGAAGAPEGSGSNSSSSSSGGGGGGGGGSNSSSSSSTFNPQADTGEQPYEHLTAESFPDISLNNEKVLVETSYPSQTTRLPPITYTGRFSLEPAPNSGNTLWPEPLFSLVSGLVSMTNPPASSSSAPSPAASSASASQSPPLSCAVPSNDSSPIYSAAPTFPTPNTDIFPEPQSQAFPGSAGTALQYPPPAYPAAKGGFQVPMIPDYLFPQQQGDLGLGTPDQKPFQGLESRTQQPSLTPLSTIKAFATQSGSQDLKALNTSYQSQLIKPSRMRKYPNRPSKTPPHERPYACPVESCDRRFSRSDELTRHIRIHTGQKPFQCRICMRNFSRSDHLTTHIRTHTGEKPFACDICGRKFARSDERKRHTKIHLRQKDKKADKSVVASSATSSLSSYPSPVATSYPSPVTTSYPSPATTSYPSPVPTSFSSPGSSTYPSPVHSGFPSPSVATTYSSVPPAFPAQVSSFPSSAVTNSFSASTGLSDMTATFSPRTIEIC

SEQ ID NO: 338 - protein, 148 aa, Homo sapiens
PPATSYAPSDVPSGVALFLTIPFAFFLPELIFGFLVWTMVAATHIVYPLLQGWVMYVSLTSFLISLMFLLSYLFGFYKRFESWRVLDSLYHGTTGILYMSAAVLQVHATIVSEKLLDPRIYYINSAASFFAFIATLLYILHAFSIYYH

SEQ ID NO: 339 - protein, 196 aa, Homo sapiens
MPGMFFSANPKELKGTTHSLLDDKMQKRRPKTFGMDMKAYLRSMIPHLESGMKSSKSKDVLSAAEVMQWSQSLEKLLANQTGQNVFGSFLKSEFSEENIEFWLACEDYKKTESDLLPCKAEEIYKAFVHSDAAKQINIDFRTRESTAKKIKAPTPTCFDEAQKVIYTLMEKDSYPRFLKSDIYLNLLNDLQANSLK

SEQ ID NO: 340 - protein, 316 aa, Homo sapiens
MATFVELSTKAKMPIVGLGTWKSPLGKVKEAVKVAIDAGYRHIDCAYVYQNEHEVGEAIQEKIQEKAVKREDLFIVSKLWPTFFERPLVRKAFEKTLKDLKLSYLDVYLIHWPQGFKSGDDLFPKDDKGNAIGGKATFLDAWEAMEELVDEGLVKALGVSNFSHFQIEKLLNKPGLKYKPVTNQVECHPYLTQEKLIQYCHSKGITVTAYSPLGSPDRPWAKPEDPSLLEDPKIKEIAAKHKKTAAQVLIRFHIQRNVIVIPKSVTPARIVENIQVFDFKLSDEEMATILSFNRNWRACNVLQSSHLEDYPFNAEY

SEQ ID NO: 341 - DNA, 422 bp, Homo sapiens
  misc_feature 6, 10, 13, 15, 29: n = A,T,C or G
gatganattnttncnagagagaggaagangctattcagttggatgggattaaatgcatcacaaataagagaacttagagagaagtcggaaaagtttgccttccaagcccgaagttaacagaatgatgaaacttatcatcaattcattgtataaaaataaagagattttcctgagagaactgatttcaaatgcttctgatgctttagataagataaggctaatatcactgactgatgaaaatgctctttctggaaatgaggaactaacagtcaaaattaagtgtgataaggagaagacctgctgcatgtcacagacaccggtgtaggaatgaccagagaagagttggttaaaaaccttggtaccatagccaaatctgggacaagcgagtttttaaacaaaatgactgaagcacaggaagatgg

SEQ ID NO: 342 - DNA, 472 bp, Homo sapiens
  misc_feature 109: n = A,T,C or G
ctggagaaggtgtgcaggggaaaccctgctgatgtcaccgaggccaggttgtctttctactcgggacactcttcctttgggatgtactgcatggtgttcttggcgctgnatgtgcaggcacgactctgttggaagtgggcacggctgctgcgacccacagtccagttcttcctggtggcctttgccctctacgtgggctacacccgcgtgtctgattacaaacaccactggagcgatgtccttgttggcctcctgcagggggcactggtggctgccctcactgtctgctacatctcagacttcctcaaagcccgacccccacagcactgtctgaaggaggaggagctggaacggaagcccagcctgtcactgacgttgaccctgggcgaggctgaccacaaccactatggatacccgcactcctcctcctgaggccggaccccgcccaggcagggagctactgtgagtccag

SEQ ID NO: 343 - DNA, 139 bp, Homo sapiens
gtcctgggccttccccttccctcaagccagggctcctcctcctgtcgtgggctcattgtgaccactggcctctctacagcacggcctgtggcctgttcaaggcagaaccacgacccttgactcccgggtggggaggtgg

SEQ ID NO: 344 - DNA, 235 bp, Homo sapiens
ctgcgggctcagcacagtagacatgactgggatccccaccttggacaacctccagaagggagtccaatttgctctcaagtaccagtcgctgggccagtgtgtttacgtgcattgtaaggctgggcgctccaggagtgccactatggtggcagcatacctgattcaggtgcacaaatggagtccagaggaggctgtaagagccatcgccaagatccggtcatacatccacatcagg

SEQ ID NO: 345 - DNA, 458 bp, Homo sapiens
ctgtaaggtgctattcagtcctgtgacccttattttggaatgctcttcattactgttgctctgttttgtgacttcctgggaaaccgcctactttggtgtggtgtcaccttgagctgtgcacataggacaccagttttgacttaacctaacaggcagtttttatctctagctttttcaagccaggtattgagcagtttcttggccaatggcctgagaaaccacctgtccctgtcaaggggtgattttattggttttaagtggggaagtaatcccatgtacttatttcttaaatacctaggaagttcttcttggtggctcctcttggccctcccctctttctcccccaacccaccatcctgcaaggcaaggaatggcctctccctccacagaggcaacggctgcagagggagcactgtggctgccatcccagttcctcttcaaagccaaacagacacgcg

SEQ ID NO: 346 - DNA, 525 bp, Homo sapiens
  misc_feature 41, 42, 47, 48, 49, 161, 316, 324, 326, 327, 379, 455, 509: n = A,T,C or G
ccagagcacaacgcctcaccatggactggacctggaggatnntcttnnnggtggcagcagccacaggtgtccactcccaagcccaacttgtgcagtctggggctgaggagaagaagcctggggcctcagtgactatttcttgtaaggcttctggatatatncttactaaatatactttacattgggtgcgccaggccccccccggacaaagacctgaatgggtgggatggatcaacactggcattgataccgttaaatattcacagaagtttcaggacagagtctccattacctgggactcatccgcgaccacagnctacctgnanntgagtagcctggaatccgaagacacggctgtgtattactgtgcgagacttanggcccgttcgctgtggtgggacttaatgacgcttttgacatctggggccaagggacagtggtcaccgtctcttcanggagtgcattcgccccaacccttttccccctctctcctgtgaagaattccccgncggatacgagcagcgt

SEQ ID NO: 347 - DNA, 423 bp, Homo sapiens
ccagacgctgacttgtttctgagtccttaagcaggaaggatttgaaatcctggagcttggcagtcttgctcttcacctctaagccaatgttgaccccttcatctataaagtccacaactctccggaagtcatcctcacggaactgtcgagaagttaaggctggggccccaagccgcaggccgcccggtgtgatggcacttcggtctccaggacaggtgttcttgttggcagtgatggatacaagctctagcacccgctcagcccgagctccatccaggcccttgggccgcaggtccaccagcaccaggtggttgtcagtaccacctgataccagtgagtagcctcgctctagcagggcatctgccatggcccgagcattcttcagaacctgcagggagtactcccggaacatgggggtgcagg

SEQ ID NO: 348 - DNA, 513 bp, Homo sapiens
cctctaggcctgatgctctcagaggcaatagaagaaaagtaaaaggaaggtctcacttcacagacaatgaaaccctcctaaccctcttccccactacccacaactccctacactgccaatctaaataaaaagaggacaatgcatgagtgtgagatacacatacacacacacacatacacacacacacacgcacagcttcctttcagccaaagaactgcaaaatccttccccggaaggaggacaactggcaacaccaatcaaggcttggtggtctaaggtgatggctggaatcatgtgagactggtaaaaatccagggagaaaatgtttcaccttcagctcattcccaagtctctatgaagcccgccccacttccacataggggaactgtggctctgggggcagcctctgcagctactcagaataggtgggaggaggggctggctttgaggctgccttagccatgaggctctttgcctaggaatagctggagatgggagctgcagggggctcag

SEQ ID NO: 349 - DNA, 231 bp, Homo sapiens
ccttatttctcttgtcctttcgtacagggaggaatttgaagtagatagaaaccgacctggattactccggtctgaactcagatcacgtaggactttaatcgttgaacaaacgaacctttaatagcggctgcaccatcgggatgtcctgatccaacatcgaggtcgtaaaccctattgttgatatggactctagagtaggattgcgctgttatccctagggtaacttgttcc

SEQ ID NO: 350 - DNA, 341 bp, Homo sapiens
ctgcccaagggcgttcgtaacgggaatgccgaagcgtgggaaaaagggagcggtggcggaagacggggatgagctcaggacagagccagaggccaagaagagtaagacggccgcaaagaaaaatgacaaagaggcagcaggagagggcccagccctgtatgaggaccccccagatcagaaaacctcacccagtggcaaacctgccacacccaagatctgctcttggaatgtggatgggcttcgagcctggattaagaagaaaggattagattgggtaaaggaagaagccccagatatactgtgccttcaagagaccaaatgttcagagaacaaactaccag

SEQ ID NO: 351 - DNA, 256 bp, Homo sapiens
ggcgttggggacggttgtaggacgtggctctttattcgtgagttttccatttacctccgctgaacctagagcttcagacgccctatggcgtccgcctcgacccaaccggcggccttgagcgctgagcaagcaaaggtggtcctcgcggaggtgatccaggcgttctccgccccggagaatgcagtgcgcatggacgaggctcgggataacgcctgcaacgacatgggtaagatgctgcaattcgtgctgcccgtgg

SEQ ID NO: 352 - DNA, 368 bp, Homo sapiens
  misc_feature 21: n = A,T,C or G
cctttcttgtaagtgaagaanaaggaatgcagcaaagaagagttcgacattggagtccttagttccatcaggatcccattcgcagcctttagcatcatgtagaagcaaactgcacctatggctgagataggtgcaatgacctacaagattttgtgttttctagctgtccaggaaaagccatcttcagtcttgctgacagtcaaagagcaagtgaaaccatttccagcctaaactacataaaagcagccgaaccaatgattaaagacctctaaggctccataatcatcattaaatatgcccaaactcattgtgactttttattttatatacaggattaaaatcaacattaaatcatcttatttacatgg

SEQ ID NO: 353 - DNA, 368 bp, Homo sapiens
ctgaggggtggcagtaagcaatgaggatgggctataaagctgttaactggctaagggccatccttgggcaggcatttcagacacatctgtagagagggcagtagcatctccgataggccagctctgaaggaagcttaatgcttaatacagtcacactgcataaattagcttagaatgctctcttgggtaaaaaatattaatagtgtatatgcacttgaagagcaaaattcctcaagaaaaaaagtttaatagcaaggagtttccatcagtcccggtctttgtgaggattaccacaacaaacacttaaaaggatacaacaggtacttattaaatgctgccttgccttttacctcttccttttttttttt

SEQ ID NO: 354 - DNA, 380 bp, Homo sapiens
ccatggcttctcacccagacagtctttctgggcaacttggggaagcccctgttctgctcaagtctcaccccatggaagaggtgggggaagggggccttggtttttcaggaagacaggttggagagcacgagtcactacaaagcagtaaaagtgaatggtgtctccaggggctgggtccagaacaccacggagagccccagccataaaggtgtgttccgcctctggcctgcaggaatctctttgaatctctttgattggtggctccaagagcaatgggaagtcaacagccaggaggctggactgggttccctgggaccccgaggtcccagagctgctgggcagtggttgtcggcaaagaagaaaggtccaagagggtcagg

SEQ ID NO: 355 - DNA, 347 bp, Homo sapiens
ccagtggaggggtgggggtatcgatcccgccgggggctggcttggttgctggtgccctgagcccttctctgcccgcctgggtgttgccttcactgatggaggtaggcgtccagccagatgtcaccagacttcttcggggacctgacgatgtccaccagcgcggtgaggaagggcttcacttcgtagctgaggccgtgcttggcacacagcgacttgaccagcggggccacccggctgtagttgtgtctcggcatcctggggaagaggtggtgctcgatctggaagttgaggtgcccgctgaaccagttggtgaaaagtgagggctccacgttgcaggtggctgccag

SEQ ID NO: 356 - DNA, 157 bp, Homo sapiens
cctggagctgctgaagactgctattgggaaagctggctacactgataaggtggtcatcggcatggacgtagcggcctccgagttcttcaggtctgggaagtatgacctggacttcaagtctcccgatgaccccagcaggtacatctcgcctgaccag

SEQ ID NO: 357 - DNA, 323 bp, Homo sapiens
ccatacagggctgttgcccaggccctagaggtcactcctcgtaccctgatccagaactgtggggccagcaccatccgtctacttacctcccttcgggccaagcacacccaggagaactgtgagacctggggtgtaaatggtgagacgggtactttggtggacatgaaggaactgggcatatgggagccattggctgtgaagctgcagacttataagacagcagtggagacggcagttctgctactgcgaattgatgacatcgtttcaggccacaaaaagaaaggcgatgaccagagccggcaaggcggggctcctgatgctgg

SEQ ID NO: 358 - DNA, 555 bp, Homo sapiens
aaaaggtttctaaaacatgacggaggttgagatgaagcttcttcatggagtaaaaaatgtatttaaaagaaaattgagagaaaggactacagagccccgagttaataccaatagaagggcaatgcttttagattaaaatgaaggtgacttaaacagcttaaagtttagtttaaaagttgtaggtgattaaaataatttgaaggcgatcttttaaaaagagattaaaccgaaggtgattaaaagaccttgaaatccatgacgcagggagaattgcgtcatttaaagcctagttaacgcatttactaaacgcagacgaaaatggaaagattaattgggagtggtaggatgaaacaatttggagaagatagaagtttgaagtggaaaactggaagacagaagtacgggaaggcgaagaaaagaatagagaagatagggaaattagaagataaaaacatacttttagaagaaaaaagataaatttaaacctgaaaagtaggaagcagaagaaaaaagacaagctaggaaacaaaaagctaagggcaaaatgtacaccac

SEQ ID NO: 359 - DNA, 549 bp, Homo sapiens
ctgccaggctgaaaagaagcctcagctcccacaccgccctcctcaccgcccttcctcggcagtcacttccactggtggaccacgggcccccagccctgtgtcggccttgtctgtctcagctcaaccacagtctgacaccagagcccacttccatcctctctggtgtgaggcacagcgagggcagcatctggaggagctctgcagcctccacacctaccacgacctcccagggctgggctcaggaaaaaccagccactgctttacaggacagggggttgaagctgagccccgcctcacacccacccccatgcactcaaagattggattttacagctacttgcaattcaaaattcagaagaataaaaaatgggaacatacagaactctaaaagatagacatcagaaattgttaagttaagctttttcaaaaaatcagcaattccccagcgtagtcaagggtggacactgcacgctctggcatgatgggatggcgaccgggcaagctttcttcctcgagatgctcttgctgcttgagagctattgctttggt

SEQ ID NO: 360 - DNA, 289 bp, Homo sapiens
tttaaattttactagtgttacttaatgtatattctaaaaagagaatgcagtaactaatgccctaaatgtttgatctctgtttgtcattactttttcaaaattatttttttctgtaaagtataatatataaaacttcttgcttaaattgaatttctatattagtggttaattgcagtttattaaagggatcattatcagtaatttcatagcaactgttctagtgttttgtgtttttaaaacagaattaggaatttgagatatctgattatatttttcatatgaatcacag

SEQ ID NO: 361 - DNA, 311 bp, Homo sapiens
ctgttcagtatggcaaagggcagacttactccttcatccactctgctgccttgatgaggtgaacacactggaataagatggagggcaggatacctgccaaagcctgaggaatgagatgatctgaaacaattgggcaaaggctggacatttcaaaaagctgacttccaactgcagtttatgggtatagaatttgatgcttccctcaagtcctgactgctctttctgaggcagccaggctaggccaagaaatgagctgctccagcttctccagagcacagcagcctcccagggcctgtcagcatctgcagcag

SEQ ID NO: 362 - DNA, 496 bp, Homo sapiens
  misc_feature 14: n = A,T,C or G
ccagtttctaaaanaatgcacatttaaagagaagcatctaccacggctttaaaacaaaacaactctgagatgaacaatatgtgttatactcagagattaacaatctcaatcatacatactgattctttcagacatttaataaccactacatttttttgcattaatgaagtttgactatatgtgtaaagggactaaatatttttgcaacagcctgttctttgttcattcttttctggatagcgtgtcctctgtattgcggtagatttatacattctgttgcctaaatatgtgtgtaaaatgagctgataaactggagtactacttaaaaaaaagtctgtgatttataagatgcatatgctttctatgtgaatataagcttgtgcacaatgtttaaaagaaaaacaatgaattagaagagatcccccgtcccccagtctgacatatttcatacagaatgtttaaaagaaaaactctgctagtcttggcaaacatttgg

SEQ ID NO: 363 - DNA, 673 bp, Homo sapiens
  misc_feature 16: n = A,T,C or G
ccaagagggagataanacaaacttctcaaacaaaaagaaaagaaaaacgaatgattcatctgctttaatcagtgtgattaatgcagcacccattgccccgggaaccgtttctgctgtactatctggatactaaaatgttacggaagtagctctttgttctccctcactctgcccttagttaatagaaattcagactcgccaagtaaggctttgtgcatagtgtcttcatgtcgcgtatagttgagcgcgttcttagcagttggcttcatggacagctcattagtgttttgacttttcttacccagcgttaattgaattcttgcttttagacaacttcctttttgtagtggtgaaccttgccctttagtacagttcaagtgaatctggataattgttcatctttgctttagcttagataccatgtagtggtctgtggctacaggaagctggttctgtctgcttccacagtctgcttaaaaaactgtctgacttcgtgaatatagagaccaagtttaccacttctgatgaagagaccaattaagattcattcctcattctgtttctttccagtgggagaagagtccccatgaaataagatgaaactgattccatgcactagtacatgtaggcttctcccttgcgcaaagcttaacaatttgtaggaaactttggg

SEQ ID NO: 364 - DNA, 495 bp, Homo sapiens
  misc_feature 13: n = A,T,C or G
ccaaatgtttgcncaagactagcagagtttttcttttaaacattctgtatgaaatatgtcagactgggggacgggggatctcttctaattcattgtttttcttttaaacattgtgcacaagcttatattcacatagaaagcatatacatcttataaatcacagacttttttttaagtagtactccagtttatcagctcattttacacacatatttaggcaacagaatgtataaatctaccgcaatacagaggacacactatccagaaaagaatgaacaaagaacaggctgttgcaaaaatatttagtccctttacacatatagtcaaacttcattaatgcaaaaaatgtagtggttattaaatgtctgaaagaatcagtatgtatgattgagattgttaatctctgagtataacacatattgttcatctcagagttgttttgttttaaagccgtggtagatgcttctctttaaatgtgcattttttagaaactgg

SEQ ID NO: 365 - DNA, 291 bp, Homo sapiens
aactgacaagcccttgcgcctgcctctccaggatgtctacaaaattggtggtattggtactgttcctgttggcccgagtggagactggtgttctcaaacccggtatggtggtcacctttgctccagtcaacgttacaacggaagtaaaatctgtcgaaatgcaccatgaagctttgagtgaagctcttcctggggacaatgtgggcttcaatgtcaagaatgtgtctgtcaaggatgttcgtcgtggcaacgttgctggtgacagcaaaaatgacccaccaatggaagcag

SEQ ID NO: 366 - DNA, 277 bp, Homo sapiens
ctggatggtgcctcagaaggtgcattctgcttctgcaggggcttgaaacaccaaggcactccagggatcctggagtcaaagcagcagccccggttgttgcactccttgggggtgacatgggggtagcccgcagtccaccctgtccttggctggcacggcacactggtttgcagacaggcccacgtactcctcagcagagctggaggacaagcaaggccaggaccagccccagcatgcagagcgctctggcagccatgaccaccgtgggctccgggac

SEQ ID NO: 367 - DNA, 311 bp, Homo sapiens
ccagagctgcggggcctcagtacacggagctgttccggatgccacagcacagcaccatgctcaggatcatctcgaagatcatgatcacagcgaccacgatggcagcaatgccgatgaggtacagcttcccggagaagaggtcatcgatcttctggtggcagtcctccttgaagaggttgctgatgatgttgctgcccgagggacacaaattgttcttgagcactgaggtggtcaaagcagtcagtgtgctggagccacagcagtcaagcgtctcgtggaaggtcttcaccacagccttggcgttgttggcg

SEQ ID NO: 368 - DNA, 384 bp, Homo sapiens
ccaaaggggtctctagctgctgctctgctgctcctgctcatggatgagtttggcgatggggccggtgatgccgcctatcaaggtccagtactcatcgaagctgatgcgcccatcaggattggcatccaggttctggatgagcttatccgcagccttccggttccctgtgtccgacagcatgtggttcagctctttctggagcatctcgcggaagctgctcttgctgatcttgttcttgaccaggctgtacctagacacatatttgtagaagttttccaccaggacaatgactgccttctccagctccgtgtagcaagtctgacatctccctgcttcgcctgctggcggggcctaaggcgggggccaagcccagttacagcccag

SEQ ID NO: 369 - DNA, 216 bp, Homo sapiens
ccaagtgccaggtggctttcagcagcttcctacgatcagccgaagaaagcagaagctctggaggctgccatcgagaacctcaatgaagccaagaactattttgcaaaggttgactgcaaagagcgcatcagggacgtcgtttacttccaggccagactctaccataccctggggaagacccaggagaggaaccggtgtgcgatgctcttccggcag

SEQ ID NO: 370 - DNA, 561 bp, Homo sapiens
ctggctccttcttttgtggtcgtttgggggatgggctggtttggggtttaggtgcagagaatggtttggggccactgcgtactggaccactctgagccttcagggcagggttcttgtgagtcttcatgtcatcagatacatgtttcagggcatgtgtaatgctctccccctgattaatctgcgcgaacagtgctgagcgggaagcagactcatctgagcctgaactggtagagactgggggaggaggggggcctggtggagggggaggaggacctgatccggcagagggtccagatggcagtccgctcagttcttttgccacaggccccgttttgctccaggccagtccggtggtatggaactccttaatgtaagcctgcagctctgtccatatacttaaataagctttgacccagtctacatgcttcttatccacatctttgtactctttgaggactcggtttgtataaaacatggcggcatcattcatttctttcgcataagggccaggcttgggagccatagccacccagcccagggcctggatactttcgctgacag

SEQ ID NO: 371 - DNA, 518 bp, Homo sapiens
cccacttccatcgctctctggtgtgaggcacagcgagggcagcatctggaggagctctgcagcctccacacctaccacgacctcccagggctgggctcaggaaaaaccagccactgctttacaggacagggggttgaagctgagccccgcctcacacccacccccatgcactcaaagattggattttacagctacttgcaattcaaaattcagaagaataaaaaatgggaacatacagaactctaaaagatagacatcagaaattgttaagttaagctttttcaaaaaatcagcaattccccagcgtagtcaagggtggacactgcacgctctggcatgatgggatggcgaccgggcaagctttcttcctcgagatgctctgctgcttgagagctattgctttgttaagatataaaaaggggtttctttttgtctttctgtaaggtggacttccagcttttgattgaaagtcctagggtgattctatttctgctgtgatttatctgctgaaagctcag

SEQ ID NO: 372 - DNA, 335 bp, Homo sapiens
ctggaggctgggtgcaccctgcccagatccacacctgtaccccggcggaaaggctcatgggcattgaagacggtggtgaaaaagccaaagggaaaagcaccaacaccaaatgagaagtggaagcccccggtatcaccaaatggctggaatccccctctgctctccggagctggtctctggccctgggggcggggtggagtttttaatctgggatcctggggcttctggctccctcgcccataaagcgggacaaccttctctctgctgatcccagctttacatactggacactcttgccgttctggccgtgtctccagccactgatgaagacatgg

SEQ ID NO: 373 - DNA, 467 bp, Homo sapiens
ccactagctgaatcttgacatggaaggttttagctaatgccaagtggagatgcagaaaatgctaagttgacttaggggctgtgcacaggaactaaaaggcaggaaagtactaaatattgctgagagcatccaccccaggaaggactttaccttccaggagctccaaactggcaccacccccagtgctcacatggctgactttatcctccgtgttccatttggcacagcaagtggcagtgtctccaccacctatgatggtgatgcagcccctagaagtggctttcaccacctcatccatgagagctttggttccccgggcaaaagcttcccattcaaatacccccacaggaccattccacacaatctgcttagcccgagtgacagcctcagcatacttcttgctgctttcaggaccacagtccaagcccatccagccagcaggtacgccagaagccacagtggcttgg

SEQ ID NO: 374 - DNA, 284 bp, Homo sapiens
tttccgtaaaagcgtgtaacaagggtgtaaatatttataattttttatacctgttgtgagacccgaggggcggcggcgcggttttttatggtgacacaaatgtatattttgctaacagcaattccaggctcagtattgtgaccgcggagccacaggggaccccacgcacattccgttgccttacccgatggcttgtgacgcggagagaaccgattaaaaccgtttgagaaactcctcccttgtctagccctgtgttcgctgtggacgctgtagaggcaggttgg

SEQ ID NO: 375 - DNA, 307 bp, Homo sapiens
cctactcttctccgtccattgtactatctgcccgtggtggggatggcagtaggatcatatttgatgacttccgagaagcatattattggctccgtcataatactccagaggatgcgaaggtcatgtcctggtgggattatggctatcagattacagctatggcaaaccgaacaattttagtggacaataacacatggaataatacccatatttctcgagtagggcaggcaatggcgtccacagaggaaaaagcctatgagatcatgagggagctcgatgtcagctatgtgctggtcatttttggagg

SEQ ID NO: 376 - DNA, 650 bp, Homo sapiens
  misc_feature 7, 10, 13: n = A,T,C or G
ccattgnctnctnacgtgatgtcatcatctgccaggtcatcttggcaaaagtcggagcatttctcagtcactgcaaagtagcccttctcgttggagcaccggaagagacgtgtgtgtttcatgtactcggcatcgtcatcatagggcttctgtgccccaatgcccacccagaagaagttctcaggctcctcaccttcgttgataacctgcttgctgtaggaggtgtcaaacatggtgttcaggatgtcttctgccaacttggcttcgtcagggtctgatgcccggcccacccaggcatacacgatgccctggttgtcctcactctcaaagggaaccttgaggatgaagcagaactcggagttgaggaggctggagtcggtgttgatctggatgcaccgggtgcagagggcgctgccgttggtgcggatctggtagaggctgggctgttgggcgccctggaccgccttcctcttgccccggtggatgatgaacttcctcttgaaatgggacaggaacttggggttctcctgctgctgcgtcatgcgtaccacctccagcttcccagggaagaggctctcgaacttcttttgcaggctgaaggtgaaggtgacccacccatattgggaggctttcacggccctgccagaagt

SEQ ID NO: 377 - DNA, 306 bp, Homo sapiens
  misc_feature 38: n = A,T,C or G
tctagatgcatgctcgagcggccgccagtgtgatgganatctgcagaattcgcccttcgagcggccgcccgggcaggttcgggtgctgccttcacctgccaggcccttccccgctagcttggggcgagcagagctgcgtccagtggaactaaagccgttccaggattatcaaaaactgagcagcaaccttgggggacctggatcatcacggactcccccaactggaaggtccttctctggcctcaattcccgtctcaaggccacgccttccacctacagtggagtcttccgcacccagcgcgtcga

SEQ ID NO: 378 - DNA, 199 bp, Homo sapiens
  misc_feature 6: n = A,T,C or G
ccacangtggcacttgggtgtggctcctctgttatttgtcctcatgtgagaaagcagatcatctccaaatcttgccatttgtatacttttggtggagacttggatgtcatatcttctttgttttgggttttcttccctagcttattttgtggcttttaaagaagtggattgtattgtgagatcctgtgattcctggtgg

SEQ ID NO: 379 - DNA, 216 bp, Homo sapiens
  misc_feature 9: n = A,T,C or G
ccagggcangtcatcaagaggggcattgtcttgcatgcggcctgccgtgtccaccagcaccacgtcaaagccttggttacgtgcaaaagcaatggcttccatggcaatgccagcagcatccttgccatagcccttttcaaacaactgcaccatggtgcggccaccatgcttctctggagggtgtagggcactcaaacgccgggtgtgtgtacgcag

SEQ ID NO: 380 - DNA, 555 bp, Homo sapiens
ccatgggccttcctttccactaaaaggaattccgaacagcaaaaagaaggtcttgagatagtgaaaatggtgatgatatctttagaaggtgaagatgggttggatgaaatttattcattcagtgagagtctgagaaaactgtgcgtcttcaagaaaattgagaggcattccattcactggccctgccgactgaccattggctccaatttgtctataaggattgcagcctataaatcgattctacaggagagagttaaaaagacttggacagttgtggatgcaaaaaccctaaaaaaagaagatatacaaaaagaaacagtttattgcttaaatgatgatgatgaaactgaagttttaaaagaggatattattcaagggttccgctatggaagtgatatagttcctttctctaaagtggatgaggaacaaatgaaatataaatcggaggggaagtgcttctctgttttgggattttgtaaatcttctcagggtcagagaagattcttcatgggaaatcaagttctaaaggctttgccccaagagatgatgaggcag

SEQ ID NO: 381 - DNA, 406 bp, Homo sapiens
ctgcaccaggtgggcctctaggtcccattaagcccattggtccagggccaagtccaactccttttccatcatactgagcagcaaagttcccaccgagaccaggggggccaggaggaccaggtggaccaggagggcctgtgggaccatcttcaccatctctgcctggggggcctggtggacccctttctccacgtggtcctctatctccggctgggccctttcttacagtttcctcttgtaaagattggcatgttgctaggcataaggttactgcaagcagcaacaaagtccgcgtatccacaaagctgagcatgtctagcacttagacatgcagactccttgtgtcgcagagcccctgggtcaccggcggaggtatcacctggcgggcgcgggcatgcagtcgtgg

SEQ ID NO: 382 - DNA, 528 bp, Homo sapiens
  misc_feature 18, 20: n = A,T,C or G
ctgagcagtttgtgggtntntcttcccgcaagtttcaggaagtattcacaaaagaaaaatacattttttcccccaggggtggggcaaggacagtggagagagtgctaggaaatgagtcccctgggaaaggggaccgggccgtgatgttaaatatctccggctcccaagtgactggatttgcctaggaccttcagaccaacagacttcagaccctcagacctgccccggggccaggtggagaaagtgagggccgtacaaggaagtgaaattctgagttgttggggctaagcctgaccccctctccatgctccccgccccaacccactctggcctcagtagatttttttttcagttgtggttgttgcccaggctggagtgcagtagcgccatcttggctcactgcacctccaccttccgggctcaagcgattctccagcctcagcctcctgagtagctaggactgcaggtgctccaccacgcccggctaatttttgtatttttagtagagatggggtttccccatgttgg

SEQ ID NO: 383 - DNA, 335 bp, Homo sapiens
  misc_feature 5, 321: n = A,T,C or G
ccatnttgagtctactcctgcgtcttgtgccctagcaccccgagaaccgtcagtttgagccagatggaagctgagctgaacacattacgatggatgatggaaacataagactatcaagaaatccaagtggtaatgggcgaagtttattcagcatccggcaatggacttatcgtagttggggaaacgggtgttccgaataatatcctggaagttatcaggacacctattttaaatataggcctgaattttgtaaagtaatatttaaggtggtccgtgataattaaataaaatgcttaattcatgtggcgaaaaaaaaaaaanaaaaaaaaaaaaaa

SEQ ID NO: 384 - DNA, 333 bp, Homo sapiens
agtccaatacggctattggggttgtagcagctttcagaggaaattagtggtctgggcttgcctccagctccccaggggcagccccagtagctacactgtccagacagcacaagaccaggctggtgtcacgtccatccgagcgctgcctcagggatcgataaagtttcactgcagaaagtctccactgcggtatgctgacatctgccctgaaccttcaccctacagcattacaggctttaatcagattctgctggaaagacacaggctgatccacgtgacctcttctgccttcactgggctggggtgatccttggtgcctttgtttccacaagg

SEQ ID NO: 385 - DNA, 343 bp, Homo sapiens
ctgtgacacctcaggttgaaagggtcttcctccttgaacacccaccgaggggcctggagcaacagccagccgatatggacttctagctgcaccgggtcactgagggtggagaggtttgtctggcacctgtactctccactgtcgtcgactgtggcagcgtcaatgaagtagctcgaggcctggcttgagatgaggctctcattgtgaaaccactgtgtggaattgtcctcaggggagtaggctccctggcacttcagagtcacactgtccttctcgagcaccctgtaccattgaggctccaggaacaccacagcctttgggagatcttcagtccgcatgccaa

SEQ ID NO: 386 - DNA, 244 bp, Homo sapiens
tattctttgattcttggcaaataggtgagagaactaatagcaaccaggcaactgaggacgaagtcaaaaagtcggtaacagaagaatggaatcagccaacccacttgataagaaattgctccataaaccagcattgaactgattataaacataagaacagagacggcaaaaagaacacaggcattatcagccattctctcagacgaatagtaattaccgatgacttcatactgaatgttgacag

SEQ ID NO: 387 - DNA, 504 bp, Homo sapiens
atctggagtccagcctcagggatgcgctactttccattctctgcattgaacattcgttctgtcagcatccgctccagcttcactgcatcagcggcaaacttgcggatcccgtcagagagcttctccacagccatctggtcctcgttgtgcaaccaacggaaagacttctcatccaggtggattttttccaggtcactggcttgggccgccttggctgagagcacaggcaccagcttggcgttgtcctgcagcagctctcccaggagcttgggtgggatggtgaggaagtcacagccggccagtgctttgatctcgcccgtgttgcggaaggaggcgcccatgacaatggttttgtagctaaacttcttgtagtagttgtagattttagtgacactctttaccccagggtcttccaggggctcataggatttcttgtcggtgtttgccacatgccaatcaaggatgcgcccaacaaatggggagatgagggtcacacccgcctcg

SEQ ID NO: 388 - DNA, 450 bp, Homo sapiens
  misc_feature 14, 199, 210, 218, 231, 267, 271, 290, 330, 342, 383, 390,395, 399, 405, 414: n = A,T,C or G
gccaaagtgctgcntgaattccactcccttggttttcgcctgcccagcgttgctgtttgcgtggagggtggggggagctcagtggcagggaatcagcggtccgtggggtcgtggggacgggaacatgtgcccgaccgctccatcccctcctcctccttaggatgcataacctaccttgtctttttttttttaaattttntttccaggtanagtagctntttgtacataaanaatacttgaaaaattaattgtatgatgtatgaaaanacanagtctcctagttttgtatnttgttgtatgactgccatgagttccaccaaaaagccactntattttggtctntgtgacattttaaatgcgtgacaaaagtgagcaaataaagngaggaanaaatntatntatganataatatanattgtattgaaatctaaaaaaaaaaaaaaaaaaaaa

SEQ ID NO: 389 - DNA, 297 bp, Homo sapiens
cctgcacttgaacatggctttggttttaagcaacttctctaccctgaccctcctcctgggacagcgtttcgggaggtttcttggcctcactgagagggatgtggagctgctgtaccccgtcaaggagaaggtattctacagcctgatgagggagagcggctacatgcacatccagtgcaccaagcctgacaccgtaggctctgctctgaatgactctcctgtgggtctggctgcctatattctagagaagttttccacctggaccaatacggaattccgatacctggaggatggagg

SEQ ID NO: 390 - DNA, 223 bp, Homo sapiens
ctgggctggagagttggtgctggcaaaacagtccttcccctggggccggttcttacccaggtccagagaaaccaacgcgggatgtcagacttcaccaaaaggactttctggttgcccctggctggcttcctggaggcgttcgcctctagtttctcagggatggagcgagagcccagccagagaacagtaagaggagctgctctcctatctgcactcacccagg

SEQ ID NO: 391 - DNA, 365 bp, Homo sapiens
ctgaggaagaaatgaaaaaagaccctgtccctcatggcccgcccactggcctcctgtgaactctgtcctgttgccaaccccagatgaagtcagccaaaaagtgctttccacatcctctctctggggctgcccagcctgaccgtaggggatccactggcagagccaaggtggatgctggtgcctgaagctggaagccagcaggacatgagacccctcctgtagcaggaagtggttctagaactcccagcagaacagaacggaaaaggagctgattggggatagaatgagttctgctaaacagccagatgctctgagagaggtgacactggactgtctcggaggtgtgtgcagatggctacaggtgg

SEQ ID NO: 392 - DNA, 302 bp, Homo sapiens
  misc_feature 28: n = A,T,C or G
ccaagagctacaatgagcagcgcatcangacagaacgtgcaggtttttgagttccagttgactgcagaggacatgaaagccatagatggcctagacagaaatctccactattttaacagtgatagttttgctagccaccctaattatccatattcagatgaatattaacatggagagctttgcctgatgtctaccagaagccctgtgtgtggatggtgacgcagaggacgtctctatgccggtgactggacatatcacctctacttaaatccgtcctgtttagcgacttcagtcaactacag

SEQ ID NO: 393 - DNA, 213 bp, Homo sapiens
  misc_feature 13, 19: n = A,T,C or G
ccaataatcaagnacaaanactggatttgaggatggatcagttctgaaacagtttctttctgaaacagagaaaatgtcccctgaagacagagcaaaatgctttggaaagaatgaggccatacaggcagcccatgatgccgtggcacaggaaggccaatgtcgggtagatgacaaggtgaatttccattttattctgtttaacaacgtggatgg

SEQ ID NO: 394 - DNA, 334 bp, Homo sapiens
cctacccataatccagagaggcttgcccagaggaggactacgtgggggacgtgccaccagaaccctacttgggggcgggatgtcactccgaggtcaaaacctgctccgaggtggacgagccgtagctccccgaatgggcttaagaagaggtggtgttcgaggtcgtggaggtcctgggagagggggcctagggcgtggagctatgggtcgtggcggaatcggtggtagaggtcggggtatgataggtcggggaagagggggctttggaggccgaggccgaggccgtggacgagggagaggtgcccttgctcgccctgtattgaccaaggagcag

SEQ ID NO: 395 - DNA, 174 bp, Homo sapiens
ccagatgaggaaaaaaattaggaaggagatgaagttttccaaatttcatggtatatgctgcacttccccaaccttcactctccatgtagcctactgggtctactattccacaaagtggctcaacctccaaatgacctctggtttacccctattaaaatcccaaaggactttcag

SEQ ID NO: 396 - DNA, 140 bp, Homo sapiens
  misc_feature 20: n = A,T,C or G
ctgcaaagccttgtgtaacnttctccagcatttggacccagtacgtgaaagcccacaacacgttcattgtctttagtattacagattatttttgcataacatttgttgttatctcttgacggaatcgtccattccaatgg

SEQ ID NO: 397 - DNA, 318 bp, Homo sapiens
cctcgcctggagggcccccgggcagcacagggaggacgagcttgtccagcagagggtctggcagagggtcccgcagaggtttgggcagggggtctgacatccctggctcctgctctggctctggctgccgggatttgcacaggcccaggtgcatacagatgccgtttgagtcagtctggttctggaagtagtcgatgaccagggggaagtagtcgtcaagcacttggttgcactggggcatgagcagcttcaaggggaggacgttgcactcctgctccaggaacttcctcatcgtgtcctggaaaatggcctccttgg

SEQ ID NO: 398 - DNA, 517 bp, Homo sapiens
  misc_feature 5: n = A,T,C or G
ccttncttcgccatccattcatcgaccctctccagcacttgctgcaggcttggctgaccatccaccatggcttgaataatcccggtgagctctgtacagaatggggtaagctgtggatggactacaggctggacatacatgtgaaaggtagactcaatctccatggtccggccatttagctttaggatggggaactcgatgatttcctgaggatgaatctgtggcttgtcgcacgtggcctcaaagtccagcactaaaaagtagtgatacctctggagagggaaggacaccattgccgccatggatgcgccaaagccgtgggccgccagctttctggtggatatggagcagaactccggaacaccacagggagaaaataagtgggagcccagcacttttcttgctcttgaaagtaaatacgaagaaaatcgagctgctccagtctgtaaaggtgctagcattgaacatccagaagcatctaaaactctccttacttcgaagatgccaagaccggcag

SEQ ID NO: 399 - DNA, 329 bp, Homo sapiens
ccaacctcaggcaacgggtggagcagtttgccagggccttccccatgcctggttttgatgagcattgaaggcacctgggaaatgaggcccacagactcaaagttactctccttccccctacctgggccagtgaaatagaaagcctttctattttttggtgcgggagggaagacctctcacttagggcaagagccaggtatagtctcccttcccagaatttgtaactgagaagatcttttctttttccttttttcggtaacaagacttagaaggagggcccaggcactttctgtttgaacccctgtcatgatcacagtgtcagagacgcg

SEQ ID NO: 400 - DNA, 451 bp, Homo sapiens
ctggcttcactgctcaggtgattatcctgaaccatccaggccaaataagcgccggctatgcccctgtattggattgccacacggctcacattgcatgcaagtttgctgagctgaaggaaaagattgatcgccgttctggtaaaaagctggaagatggccctaaattcttgaagtctggtgatgctgccattgttgatatggttcctggcaagcccatgtgtgttgagagcttctcagactatccacctttgggtcgctttgctgttcgtgatatgagacagacagttgcggtgggtgtcatcaaagcagtggacaagaagctgctggagctggcaaggtcaccaagtctgcccagaaagctcagaagctaaatgaatattatccctaatacctgccaccccactcttaatcagtggtggaagaacggctcagaactgtttgtttcaattgg

SEQ ID NO: 401 - DNA, 180 bp, Homo sapiens
ccaggaagcaggccaggggattggcagcactgcccagcaccacagccaggtggtaggccagacgcccgtagggtaagcaggaaaagctctgcacggcaggcagcacgccattggtcagcgcgttggtggcggccaacaggcccagcaggcaggcactgcgggctgatagaagctgatagg

SEQ ID NO: 402 - DNA, 385 bp, Homo sapiens
ccaggccacctgtgcggggctcctcgatgtggaaggttcgggtgaggagattgtagaaggagccgtagcacacggccaccacagtgcacgtgaggcagatcacgttgtagggcatgctgaagtccggtgtcggcaggttcaccagcagcggctccgtgtagagccgcacaaagtagttagagccatcagagactgggaacaggctgttgaagaggggactctcttcccagtccactggcttggctgctaccatgctgggcacaagggcgctgaggacagatgggctgacatagaagccatggttaggatctggcgtgtactcggtccacttcagcagcgcccgctcaaactggatggaaaccttggtgactgagttggccggcag

SEQ ID NO: 403 - DNA, 440 bp, Homo sapiens
  misc_feature 13: n = A,T,C or G
ctgtttaaccagnaacccggggggtcaccccccacagaatgtacatgaaacactagaggactgcatgtttttccctgagagaagcgtaagacaaacagaagtcaaaaagtagtcactgggagcgccatccttctaagcaaatcctccctttcccttttggaggatttgcccgaactacgtagccagtcagcacttagaccacctgcctcctcccccccctataaacccaccactcccctcctcctttcccaaaccacttggggtgtcctaagccctcactgccccaagcccaaaatatcagctaagatccttgtcagtatttccacagtcatacctaatgaattgggaagtggggcccctaaaaaccaattcacatctatgcacttgtttccactggatttggcagacaggcttttttagttaccgtaaccagatcttaa

SEQ ID NO: 404 - DNA, 239 bp, Homo sapiens
cctacgaaaaactcccggccggtgaagagaacgtcagtgccatccagcgtcgcgttctcgtctcctatttccacaattcggagccccaggtcttgcagggctttgcggactccatcgacctctggcctacgagcggggctccagggccgcgtgattagggccgtgtccccttggatcacggccgtgtcgccaagcagcggtcccagcggcaatgactcctcaggtggcagttctagcag

SEQ ID NO: 405 - DNA, 261 bp, Homo sapiens
ctggagaggcagcccttcaccggatgcccagctccgtgcccctgcgggccccagcacagtttaccttctccccccacggcggtcccatctactctgtgagctgttcccccttccacaggaatctcttcctgagcgctgggactgacgggcatgtccacctgtactccatgctgcaggcccctcccttgacttcgctgcagctctccctcaagtatctgtttgctgtgcgctggtccccagtgcggcccttggtttttgcag

SEQ ID NO: 406 - DNA, 641 bp, Homo sapiens
  misc_feature 13: n = A,T,C or G
ctgctcccgggcntggtggcagcaagtagacatcgggcctgtgcagggccacccccttgggccgggagatggtctgcttcagtggcgagggcaggtctgtgtgggtcacggtgcacgtgaacctctccccggaattccagtcatcctcgcagatgctggcctcacccacggcgctgaaagtggcattggggtggctctcggagatgttggtgtgggttttcacagcttcgccattctggcgggtccaggagatggtcacgctgtcataggtggtcaggtctgtgaccaggcaggtcaacttggtggacttggtgaggaagatgctggcaaaggatggggggatggcgaagacccggatggctgtgtcttgatcggggacacacatggaggacgcattctgctggaaggtcaggcccctgtgatccacgcggcaggtgaacatgctctggctgagccagtcgctctctttgatggtcagtgtgctggtcaccttgtaggtcgtgggcccagactctttggcctcagcctgcacctggtccgtggtgacgccagaccccacctgcttcccctcgcgcagccaggacacctgaatctgccggggactgaaacccgtggcctggcagatgagcttggacttgcgg

SEQ ID NO: 407 - DNA, 173 bp, Homo sapiens
ccaggtactggcacaatcatgtctggatgggggtggtggtgtcctgtaggcagagaaacaggaaattgtcgtagtcagtatcgagcagcgtggcctcgttcgccaccgtatagttgatcttgaacttctttggattctcagtcttctctccaaggaccttcttctcaacacag

SEQ ID NO: 408 - DNA, 165 bp, Homo sapiens
ccactgtctgcagccatggcagaaagtgctcaaagtccagcaccttcacattcatctcatcactcttggggttccccaggaccttgagcacctcggcgttggtagggttctggcccagggccctcatcacatccccacactggctgtacaggatcttgccatcac

SEQ ID NO: 409 - DNA, 329 bp, Homo sapiens
ctgtagcttctgtgggacttccactgctcaggcgtcaggctcagatagctgctggccgcgtacttgttgttgctttgtttggagggtgtggtggtctccactcccgccttgacggggctgctatctgccttccaggccactgtcacggctcccgggtagaagtcacctatgagacacaccagtgtggccttgttggcttgaagctcctcagaggagggcgggaacagagtgaccgagggggcagccttgggctgaccaaggacggtcagcttggtccctccgccaaataccgccggataagcaccactgttgtctgctgattgacagaa

SEQ ID NO: 410 - DNA, 235 bp, Homo sapiens
  misc_feature 8: n = A,T,C or G
ccatcagngagaaaggtgtttgtcagttgtttcacaaaccagattgaggaggacaaactgctctgccaatttctggatttctttattttcagcaaacactttctttaaagcttgactgtgtgggcactcatccaagtgatgaataatcatcaagggtttgttgcttgtcttggatttatatagagctttttcatatgtctgagtccagatgagttggtcaccccaacctctggag

SEQ ID NO: 411 - DNA, 294 bp, Homo sapiens
aattaagggaagatgaagatgataaaacagttttggatcttgctgtggttttgtttgaaacagcaacgcttcggtcagggtatcttttaccagacactaaagcatatggagatagaatagaaagaatgcttcgcctcagtttgaacattgaccctgatgcaaaggtggaagaagagcctgaagaagaacctgaagagacagcagaagacacaacagaagacacagagcaagacgaagatgaagaaatggatgtgggaacagatgaagaagaagaaacagcaaaggaatctacag

SEQ ID NO: 412 - DNA, 433 bp, Homo sapiens
  misc_feature 135, 138, 153, 162, 187, 206, 208, 212, 214, 219, 224, 237,254, 271, 295, 303, 330, 336, 348, 358, 364, 367, 375, 394,433: n = A,T,C or G
cctgagaagccagaggcaggtggagagggggtggaaagtgagcagcgggctgggctggagccgcacacgctctcctcccatgttaaatagcacctttagaaaaattcacaagtccccatccacaaaaaaaaaaanaanaaaaatttcagggantaaaaatanactttgaacaaaaaggaacatttgntggcctgggggggcatctnantttntntagcnccagngattccctccccnccccacccatcacatanatgtaacacctttggtntaaaatggggagccgtttccaccntgcccccntccccgcccccaggcagttgccccggngacacntcaagacaggancgaggtagtntttcancancacagttncacaaggaacagaacagtntctcccgcccagccctgcggcacaagggattgacacgcn

SEQ ID NO: 413 - DNA, 494 bp, Homo sapiens
  misc_feature 17: n = A,T,C or G
ccttatttctcttgtcncttcgtacagggaggaatttgaagtagatagaaaccgacctggattactccggtctgaactcagatcacgtaggactttaatcgttgaacaaacgaacctttaatagcggctgcaccatcgggatgtcctgatccaacatcgaggtcgtaaaccctattgttgatatggactctagaataggattgcgctgttatccctagggtaacttgttccgttggtcaagttattggatcaattgagtatagtagttcgctttgactggtgaagtcttagcatgtactgctcggaggttgggttctgctccgaggtcgccccaaccgaaatttttaatgcaggtttggtagtttaggacctgtgggtttgttaggtactgtttgcattaataaattaaagctccatagggtcttctcgtcttgctgtgttatgcccgcctcttcacgggcaggtcaatttcactggttaaaagtaagagacag

SEQ ID NO: 414 - DNA, 294 bp, Homo sapiens
ctgggcggatagcaccgggcatattttggaatggatgaggtctggcaccctgagcagtccagcgaggacttggtcttagttgagcaatttggctaggaggatagtatgcagcacggttctgagtctgtgggatagctgccatgaagtaacctgaaggaggtgctggctggtaggggttgattacagggttgggaacagctcgtacacctgccattctctgcatatactggttagtgaggtgagcctggcgctcttctttgcgctgagctaaagctacatacaatggccttgtgg

SEQ ID NO: 415 - DNA, 421 bp, Homo sapiens
ccttgcccctgccctcccacgaatggttaatatatatgtagatatatattttagcagtgacattcccagagagccccagagctctcaagctcctttctgtcagggtggggggttcagcctgtcctgtcacctctgaggtgcctgctggcatcctctcccccatgcttactaatacattcccttccccatagccatcaaaactggaccaactggcctcttcctttcccctgggaccaaaatttaggggcctcagtccctcaccgccatgccctggcctattctgtctctccttcttccccctggcctgttctgtctctgagctctgtgtcctccgttcattccatggctgggagtcactgatgctgcctctgccttctgatgctggactggccttgcttctacaagtatgcttctcccacag

SEQ ID NO: 416 - DNA, 342 bp, Homo sapiens
  misc_feature 17: n = A,T,C or G
ccactttctttcccacnctggaaggcggcatctatgacttcattggggagttcatgaaggccagcgtggatgtggcagacctgataggtctaaaccttgtcatgtcccggaatgccggcaagggagagtacaagatcatggttgctgccctgggctgggccactgctgagcttattatgtcccgctgcactcccctatgggtcggagcccggggcattgagtttgactggaagtacatccagatgagcatagactccaacatcagtctggtccattacatcgtcgcgtctgctcaggtctggatgataacacgctatgatctgtaccacaccttccggccgg

SEQ ID NO: 417 - DNA, 389 bp, Homo sapiens
tattaattaggttcttaagacatttagaacaccaatttgtgaggataaattccattcgtcagagcaaacacagatcgcaggtagccctggagctgaggaatagctttgatttttggtaaaatttgtgagtccacagctttctgatcaatcttgcgctgctccgtaatctcatatttctctttttctgtgtcgaagatctcaccttcctggtgtctgggcttccgcagcttcttcttcttgaagtaagcatcagtaagatgttttgggatttttacattgctgatatcgattttggttgaagtggcaatgacaaatttctggtgtgttcttcgtagaggaactcgattgaggaccagaggtccagtcacaagtaataagccactagccag

SEQ ID NO: 418 - DNA, 343 bp, Homo sapiens
gtgggagggagccaggttgggatggagggagtttacaggaagcagacagggccaacgtcgaagccgaattcctggtctggggcaccaacgtccaagggggccacatcgatgatgggcaggcgggaggtcttggtggttttgtattcaatcactgtcttgccccaggctccggtgtgactcgtgcagccatcgacagtgacgctgtaggtgaagcggctgttgccctcggcgcggatctcgatctcgttggagccctggaggagcagggccttcttgaggttgccagtctgctggtccatgtaggccacgctgtttttgcagtggtaggtgatgttctgggagg

SEQ ID NO: 419 - DNA, 255 bp, Homo sapiens
cctagcaagagaatcaccaaatttatggagagttaacaggggtttaacaggaaggaagtgcctttagtaagttctcaagccagaggctggaggcagcagctaaatcagaggacagcatcctcagtgaaagtgagccattcggggtggcatgtcactccaggaataaacacaacttagaaacaaatgatttcgtaggatagcacagtgacatggtgcactgtgaacctgaggccactgtgtcaaactgtgcactgg

SEQ ID NO: 420 - DNA, 261 bp, Homo sapiens
cttctgatgataaccaacccctagctaccactctgtattcatcaggggaggggtataaaccccacatgcaagaagaacccttgcccccagtgtcaaatgggatggggatgctagagttatagtaaaggggaaaccctatgtaagctgttaacagagttcacaggggtagggataacccctgttctccagctcccaaatgtgctcactttcccagcttcttcatccgttcatcaatgctggcaaagttcccctcaactgtgg

SEQ ID NO: 421 - DNA, 179 bp, Homo sapiens
ccttcctgttgttgtttcaaatgctgcttgatttctcgtaacagatctgcatctatgtaatacctttcttcagatctgactgctccaaaatgattctgcatcctgatttgagacatcaattcatttagtcggcccttgaactgagtaggtgcatttagttcaccctgaatcgtatccag

SEQ ID NO: 422 - DNA, 424 bp, Homo sapiens
cgaggtccaaatctgatctgcagatgcagaagattcgacagaagctgcagactaaacaggctgccatggagaggtctggaaaagctaagcaactgcgagcacttaggaaatacgggaagaaggtgcaaacggaggttcttcagaagaggcagcaggagaaagcccatatgatgaatgctattaagaaatatcagaaaggcttctctgataaactggatttccttgagggagatcagaaacctctggcacagcacaagaaggcaggagccaaaggccagcagatgaggaaggggcccagtgctaaacgacggtataaaaaccagaagtttggttttggtggaaagaagaaaggctcaaagtggaacactcgggagagctatgatgatgtatctagcttccgggccaagacagctcatggcagagg

SEQ ID NO: 423 - DNA, 256 bp, Homo sapiens
ctgtggcctagggctacctcaagactcacctcatccttaccgcacatttaaggcgccattgcttttgggagactggaaaagggaaggtgactgaaggctgtcaggattcttcaaggagaatgaatactgggaatcaagacaagactataccttatccataggcgcaggtgcacagggggaggccataaagatcaaacatgcatggatgggtcctcacgcagacacacccacagaaggacactagcctgtgcacgcg

SEQ ID NO: 424 - DNA, 330 bp, Homo sapiens
ccagccgcatgggagtggaggcagtcatcgccttgctagaggccaccccggacaccccagcttgcgtcgtgtcactgaacgggaaccacgccgtgcgcctgccgctgatggagtgcgtgcagatgactcaggatgtgcagaaggcgatggacgagaggagatttcaagatgcggttcgactccgagggaggagctttgcgggcaacctgaacacctacaagcgacttgccatcaagctgccggatgatcagatcccaaagaccaattgcaacgtagctgtcatcaacgtgggggcacccgcggctgggatgaacgcggccgtacgctcag

SEQ ID NO: 425 - DNA, 333 bp, Homo sapiens
  misc_feature 12, 124, 133, 145, 152, 244, 249, 254, 263, 307: n = A,T,C or G
ctgctccatggnctcaaagtcagcaccacccacacccacaatgatcactgacatgggcaggttcgaggcacgcaccacagcctcacgtgtggcttccacatccgtcacagcaccatcagtcagnagaaacagnatgaagtattgngaggcantcccctgatgtgcagcctgggctgcaaacctggacctgcccgggcggccgctcgaaagggcgaattccagcacactggcggccgttactagnggatncaganctcggtacnaagcttggcagtaatcatggtcatagctgtttcctgtgagcggntgggatgaacgcggccgtacgctcat

SEQ ID NO: 426 - DNA, 411 bp, Homo sapiens
  misc_feature 346: n = A,T,C or G
gggtgttcatcatgaggattgcttctgccatggagctgatggacgtgggcaggttgctgagaaggtggggtggaagtgagtgccgggggtgggtgagtgccctggtcttgttcataggggagcctttccctagcagtggaacgctgtggtcattttctctagcatattcccttgggaagtctagatttgctattaatctggctgagaatctaagttctgtgccttagagacagtttgcactttcccatattgtgcctgggacagccatatgattttttttcccaccaaacaagtatgcaaacagaaaccagttcaaagggggatggtgtaaaagatgaggcagtanaaatgcctttgaatggttttctgtagctaattctctttaaattttgtcctgctttttttctttat

SEQ ID NO: 427 - DNA, 450 bp, Homo sapiens
  misc_feature 136: n = A,T,C or G
acgtgtacaagtttgaactggatacctctgaaagaaagattgaatttgactctgcctctggcacctacactctctacttaatcattggagatgccactttgaagaacccaatcctctggaatgtggctgatgtggncatcaagttccctgaggaagaagctccctcgactgtcttgtcccagaaccttttcactccaaaacaggaaattcagcacctgttccgcgagcctgagaagaggccccccaccgtggtgtccaatacattcactgccctgatcctctcgccgttgcttctgctcttcgctctgtggatccggattggtgccaatgtctccaacttcacttttgctcctagcacgattatatttcacctgggacatgctgctatgctgggactcatgtatgtctactggactcagctcaacatgttccagaccttgaagtacctgg

SEQ ID NO: 428 - DNA, 377 bp, Homo sapiens
  misc_feature 133, 181, 246, 264, 280, 290, 300, 325, 360, 362, 374: n = A,T,C or G
cagggctatagtgcgctatgttgatctggtgttcatgctaagttccgcatcaatatggtgacttcttgggagtgggggaccaccaggttgcctaaggaggggtgaacctgcctacgttggaaatagagctggncaaaactcctgtgctcatcagtagtagaattgcacctgtgaatagccnccgccctccagcatgggcaacataacaagaccctgcctcttaaagataaaaattggaaaacactngtaggaaaaaaagggtgnttggtctaaataaatntggattgggnataaatgacncaaaactatcatgaatttgaaagcntttctaatttcttgaaagtctgaaaaaagttaaancncaattttatctnaaa

SEQ ID NO: 429 - DNA, 206 bp, Homo sapiens
gttgctcctccaaagaaggttggcttcaaggccgtgtccagggacccacgagcagaggcactggggggcaagggatctccaagggggcaagggatccctaaagggggtagctcacaggtgagggggtttagggcccctctagggagcgcctgaggccatacattcaagagtgtccctggtgaggcccagggaagagccaggactgg

SEQ ID NO: 430 - DNA, 473 bp, Homo sapiens
  misc_feature 9, 329, 335, 363, 365, 448: n = A,T,C or G
ccttatttntcttgtcctttcgtacagggaggaatttgaagtagatagaaaccgacctggattactccggtctgaactcagatcacgtaggactttaatcgttgaacaaacgaacctttaatagcggctgcaccatcgggatgtcctgatccaacatcgaggtcgtaaaccctattgttgatatggactctagaataggattgcgctgttatccctagggtaacttgttccgttggtcaagttattggatcaattgagtatagtagttcgctttgactggtgaagtcttagcatgtactgctcggaggttgggttctgctccgaggtcnccccanccgaaatttttaatgcaggtttggtagntnaggacctgtgggtttgttaggtactgggtgcattaataaattaaagctccatagggtcttctcgtcttgctgtgttatgcccncctcttcacgggcaggtcaatttca

SEQ ID NO: 431 - DNA, 215 bp, Homo sapiens
  misc_feature 8, 15: n = A,T,C or G
cctgtatnaagctanaaaaagactaccagcccgggatcaccttcatcgtggtgcagaagaggcaccacacccggctcttctgcactgacaagaacgagcgggttgggaaaagtggaaacattccagcaggcacgactgtggacacgaaaatcacccaccccaccgagttcgacttctacctgtgtagtcacgctggcatccaggggacaagcagg

SEQ ID NO: 432 - DNA, 391 bp, Homo sapiens
  misc_feature 377: n = A,T,C or G
ccagcactgccacaaactttttcagggccaccaggcgctgcccttccaggaccgggaacctgcccacttctatccgcaggatgtagtgcagtgcagattccaggtcagccatgtagatcctggagcgatctgccaatttccaaacagtgggagctatcttgttagcagtggttggtgcaactgtggtctgggcagcctccctggtgagcccagagagtctctgcaggtaagcggtatagaaggacctggattccatgagcacggggactcgggagacggagccattccggaacagcaggtagcaagaggggaagtcggtgacaccaaactttctcaccacattggcctctgtgttcagcaccctgcgcaccgccacncctttgtgctggga

SEQ ID NO: 433 - DNA, 420 bp, Homo sapiens
  misc_feature 275, 295, 328, 374, 399, 413, 420: n = A,T,C or G
ctgtagcttctgtgggacttccactgctcaggcgtcaggctcagatagctgctggctgcgtacttgttgttgctttgtttggagggtgtggtggtctccactcccgccttgacggggctgctatctgccttccaggccactgtcacggctcccgggtagaagtcacttatgagacacaccagtgtggccttgttggcttgaagctcctcagaggagggcgggaacagagtgaccgagggggcagccttgggctgacgtaggacggttagtttggnccctccgccgaatgccgcanttctactgtcccacacctgacagtaatagtcancctcatcttcggcttgggctctgctgatggtcagggtggcccgtgntccccgagttggagccagggaatcnctcagggatcccanagggccn

SEQ ID NO: 434 - DNA, 239 bp, Homo sapiens
  misc_feature 8, 199, 236: n = A,T,C or G
ccaaccangagagaagggatcgcctggtgcccagggcccaccaggagctccaggcccacttgggattgctgggatcactggagcacggggtcttgcaggaccaccaggcatgccaggtcctaggggaagccctggccctcagggtgtcaagggtgaaagtgggaaaccaggagctaacggtctcagtggagaacgtggnccccctggaccccagggtcttcctggtctggctggtncag

SEQ ID NO: 435 - DNA, 415 bp, Homo sapiens
  misc_feature 78, 225, 228, 276, 328, 330, 339, 352, 378, 387, 405, 415: n = A,T,C or G
ctgtccaatggcaacaggaccctcactctattcaatgtcacaagaaatgacgcaagagcctatgtatgtggaatccanaactcagtgagtgcaaaccgcagtgacccagtcaccctggatgtcctctatgggccggacacccccatcatttcccccccagactcgtcttacctttcgggagcaaacctcaacctctcctgccactcggcctctaacccatccccncantattcttggcgtatcaatgggataccgcagcaacacacacaagttctntttatcgccaaaatcacgccaaataataacgggacctatgcctgtttagggntntaacttggntactggccgcaanaattccatagtcaagagcatcacagnctctgcatntggaacttctcctggctntcagacctgn

SEQ ID NO: 436 - DNA, 152 bp, Homo sapiens
ccaggattgacaggccatccattcacagccaggagatgctgggccagtccctccaagaggtctccgtcatggcagtgatgaaaacctaacagggtggccccctgtgccagctcaggtgactggagcccgagggcctgacaggttcccagcag

SEQ ID NO: 437 - DNA, 174 bp, Homo sapiens
ccaggtactggcacatcatgctctggatgggggtggtggtgtcctgtaagcagagaaacaggaaattgtcgtagtcagtatcgagcagctgtggcctcgttcgccaccgtatagttgatcttgaacttctttggattctcagtcttctctccaaggaccttcttctcaacacag

SEQ ID NO: 438 - DNA, 485 bp, Homo sapiens
  misc_feature 324, 371, 393, 412, 419: n = A,T,C or G
ccacggccctctcggccctctcgctgggagcggagcagcgaacagaatccatcattcaccgggctctctactatgacttgatcagcagcccagacatccatggtacctataaggagctccttgacacggtcaccgccccccagaagaacctcaagagtgcctcccggatcgtctttgagaagaagctgcgcataaaatccagctttgtggcacctctggaaaagtcatatgggaccaggcccagagtcctgacgggcaaccctcgcttggacctgcaagagatcaacaactgggtgcaggcgcagatgaaagggaagctcgccnggtccacaaaggaaattcccgatgagatcagcattctccttctcggngtggcgcacttcaaggggcagngggtaacaaagtttgactncagaaangacttccctcgaggatttctacttggatgaagagaggaccgtgagggtccccatgatgtcggaccc

SEQ ID NO: 439 - DNA, 317 bp, Homo sapiens
  misc_feature 146, 268: n = A,T,C or G
gggccgtcttcccctccatcgtggggcgccccaggcaccagggcagtgatggtgggcatgggtcagaaggattcctatgtgggcgacgaggcccagagcaagagaggcatcctcaccctgaagtaccccatcgagcacggcatcgncaccaactgggacgacatggagaaaatctggcaccacaccttctacaatgagctgcgtgtggctcccgaggagcaccccgtgctgctgaccgaggcccccctgaaccccaaggccaaccgcnagaagatgacccagatcatgtttgagaccttcagcaccccagccatgta

SEQ ID NO: 440 - DNA, 338 bp, Homo sapiens
  misc_feature 4: n = A,T,C or G
ccanaaagacttcccagggaagatgcttggctctctgctccaaggtgggccatggtatagggccctcgaagggcttgtggctggggtgatcccagggggcattgctcaaagtgcacaggaggtggcagcagggtcaggcgagttcctgttccagggacatcaggagggagggtagaagcctagggagtgtgcgaggctgctgggatgagggagctcaggggctaccagctaaccagcctcagctcaatggtttctccatccttgggtctgtagtcagcaataccttgcaacagtggggtgttggggtctcggagaagctgccagaactccctttctcc

SEQ ID NO: 441 - DNA, 505 bp, Homo sapiens
  misc_feature 10, 186, 246, 321, 330, 403, 404, 406, 416, 445, 459, 481,484: n = A,T,C or G
ccacacagantcaccaagccacagacttgtcttccacaagcacgttcttatcttagccacgaagtgaccaagccacacgtactaaaggttgaactcaaagatatgtacagggtattaaacaaataccaaggggaacagttaacttcaatacaaggtcgaaatcagcaacaagttctacaatccagngctgatatcagatacaagcttcaaggacaatttcttttcgaaggcttattccagtttcgngaggctagcatgaggtgtgtgcatttgccaggggcaaatttctattctcaattaacccatgcagcaaatgctacncatggtgcngagtccgtttagaagcatttgcggtggacgatggaggggcccgactcgtcttactcctgcttgctaatccacnngngctggaaggnggacagtgaggccacggatggagccaccnatccacaccgagtncttgcgctctgggggtgcgatnatnttgatcttcatggtgctgggc

SEQ ID NO: 442 - DNA, 386 bp, Homo sapiens
  misc_feature 331, 369: n = A,T,C or G
cgccaggtgatacctccgccggtgacccaggggctctgcgacacaaggagtctgcatgtctaagtgctagacatgctcagctttgtggatacgcggactttgttgctgcttgcagtaaccttatgcctagcaacatgccaatctttacaagaggaaaccgtaagaaagggcccagccggagatagaggaccacgtggagaaaggggtccaccaggccccccaggcagagatggtgaagatggtcccacaggccctcctggtccacctggtcctcctggcccccctggtctcgatgggaactttgctgctcagtatgatggaaaaggagggnggacttggccctggaccaatgggcttaatgggacctanaggcccacctggtgcag

SEQ ID NO: 443 - DNA, 404 bp, Homo sapiens
  misc_feature 241, 306, 311, 328, 339, 362, 372, 385: n = A,T,C or G
cctccctctcagagcttgccccagggactctctggccctcagggttcaatgtattctgaccaaggccaagctttcctggggctcagggaaaatcacactttgctacccgaagctgtatcccctcagatgccaggaaggccgtgatcatctgactccaccctcctgagacacattctctccctgactgtcctgttctaagtcagcggagcaccttaggatggaggggtggaggcgaggccangatgcagcctctgtgaacaggtgcctggaggctgggaaatgaccctgagagggcaggacacagcnaccgngggcttaaggtgagggnggagagcaagnttggcccactttacaattctagntcagagccancccctaacatggngggcatttattcatttcgg

SEQ ID NO: 444 - DNA, 318 bp, Homo sapiens
  misc_feature 58, 69, 87, 195, 250, 275, 286, 302, 305, 317: n = A,T,C or G
catgggctatagtgcgctatgttgatctggtgttcatgctaagttccgcatcaatatngcgacttcttnggagtgggggaccaccangttgcctaaggaggggtgaacctgcctacgttggaaatagagctggtcaaaactcctgtgctcatcagtagtagaattgcacctgtgaatagccaccgccctccagcntgggcaacatagcaagaccctgcctcttaagataaaaattggaaaacactggtangaaaaaaaggctgtttggtctaaanaagtctggatngggtataaatgacacnaanctatcatgactnt

SEQ ID NO: 445 - DNA, 418 bp, Homo sapiens
  misc_feature 288, 354, 375, 387, 389, 400: n = A,T,C or G
ccagtccaacctgctcctcattattgtataaatgagcagaatcaatatggcggaagccagcttcaattgccaatttggtggcctctaaagctttacttttaggaacctctgcaggcgcataggtgccaaatcccaggacaggcatgaagtgaccatcattcagcttcacacactgatatttcgaatccatttctgtcactagcctggctggcaaatgtttctttcttcctccctcacaggctataagagcaatgagctggcaacgcccctgagcacactgtctgctgnttaaccaatggcatgtgagaggagggacagaggcagtcttacacaagctgtgataaaaattgcatncagttcaaccagtttcttacnttattctaatgngnaggaagtgtgngaagagcacaaagtcaga

SEQ ID NO: 446 - DNA, 361 bp, Homo sapiens
  misc_feature 10, 78, 89, 148, 193, 201, 253, 259, 265, 288, 290, 292,298, 318, 342, 343, 346, 354: n = A,T,C or G
ctgtccaatnacaacaggaccctcactctactcagtgtcacaaggaatgatgtaggaccctatgagtgtggaatccanaacgaattaantgttgaccacagcgacccagtcatcctgaatgtcctctatggcccagacgaccccaccntttccccctcatacacctattaccgtccaggggtgaacctcagcntctcctgncatgcagcctctaacccacctgcacagtatccttggctgattgatgggaacntccagnaacacnacacaagagctctttatctccancntnactganaagaacagcgcgactctatnccttccagggggggggggtggggnntgnggaccttnccgggcc

SEQ ID NO: 447 - DNA, 321 bp, Homo sapiens
  misc_feature 7, 9, 105, 121, 192, 202, 213, 299, 301, 305: n = A,T,C or G
ccagganantggttccccaaaggggacctcacccgccccgagctctggagccgctgacgctcgcatccaggacatttgagatgggaatccaaataggctacttgnaaaagacgtgctgcangcagccctggagagactcatggagttcattgtacattactccatctaccgaggcagcgcatggcatgactnaacggcttgnaacaaacacanaaattaccaccacaaacattcaggaaccaaatataatctgctatggtcacaccacagacaatgcaggaagaggctttttattgctngngtgngttttcaaatcatgtt

SEQ ID NO: 448 - DNA, 325 bp, Homo sapiens
  misc_feature 107, 222, 251, 296, 301, 325: n = A,T,C or G
ccagcttcaactttttagtatagaagatacaggatcacaaaaaggagactacgctttgcaaacatagcatcaaaattcaacttttctctttgcagtttatccatggngtcagcataccttgcaagggaagctacttacatcaaataacttttctatatacatttcctcattgaccttttctcaaagaatatcttggttttgccgaacaaacataatataggngtctgccagatccattcctggtttctgtngtgaaggaaaagcagggggaacaaaataatatcagggtctcaatngtganattattatttaatcataccctgan

SEQ ID NO: 449 - DNA, 123 bp, Homo sapiens
  misc_feature 8, 69, 70: n = A,T,C or G
cattaatnttggaagcgatggtgtggattacatcagtgttagggcatggtgtggatattattacattannattggaagcgatggtgtggattacatcagtgatagggcacggtgtggatatta

SEQ ID NO: 450 - DNA, 328 bp, Homo sapiens
  misc_feature 241, 257, 323, 325, 328: n = A,T,C or G
ctggcaattttgagctgccggttatacaccaaaatgttctgttcagtacctagctctgctcttttatattgctttaaatttttaaagaaattatattgcatggatgtggttatttgtgcatattttttaacaatgcccaatctgtatgaataatgtaaacttcgatttttttttaaaaaaattagattttagctggagcttttgactaatgtaaagtaaatgccaaactaccgacttgatngggatgtttttgtaangttaattttctaagactttttcacatccaaagtgatgctttgctttgggttttaactgtttcaacntnggn

SEQ ID NO: 451 - DNA, 209 bp, Homo sapiens
ctgccttgtttcaacagacatgcaaagatcctaggagacagtccccatagaccttcagacattaaaaagggagccgtacagtttgtttgaagcacttcgtcttacccatttatgcaggggccccaggaaacttacacacagccagaatgaggttcccaaaggacttacattaattatggctcttgcttcctttcacaaatgagctgagg

SEQ ID NO: 452 - DNA, 457 bp, Homo sapiens
  misc_feature 8, 290, 392, 416: n = A,T,C or G
ctgtctantcccttcaagagctgtttatagaagcttgagaatggggtaaaaatttctgctagcaaaatcaagttctttttgaaattttatcagtaatccagaatttagtagtccatgccttctcactcagcatttagaaataaaaatgtggtttcttaaacgtatatcctttcatgtatatttccacatttttgtgcttggatataagatgtatttcttgtagtgaagttgttttgtaatctactttgtatacattctaattatattatttttctatgtattttaaatgnatatggctgtttaatctttgaagcattttgggcttaagattgccagcaccacacatcagatgcagtcattgttgctatcagtgtggaatctgatagagtctngactccggccacttggagttgtgnactccaaagctaaggacagtgatgaggaagatggcatgtgg

SEQ ID NO: 453 - DNA, 277 bp, Homo sapiens
ccaattgatttgatggtaagggagggatcgttgacctcgtctgttatgtaaaggatgcgtagggatgggagggcgatgaggactaggatgatggcgggcaggatagttcagacggtttctatttcctgagcgtctgagatgttagtattagttagttttgttgtgagtgttaggaaaagggcatacaggactaggaagcagataaggaaaatgactacgagggcgtgatcatgaaaggtgataagctcttctatgataggggaagtagcgtcttgta

SEQ ID NO: 454 - DNA, 198 bp, Homo sapiens
gttaaaagatagtagggggatgatgctaataatcaggctgtgggtggttgtgttgattcaaattatgtgttttttggagagtcatgtcagtggtagtaatataattgttgggacgattagttttagcattggagtaggtttaggttatgtacgtagtctaggccatatgtgttggagattgagactagtagggctagg

SEQ ID NO: 455 - DNA, 608 bp, Homo sapiens
  misc_feature 43, 225, 502, 508, 569: n = A,T,C or G
ctgagcaagctaaggaccaggggcaactagaccctaataatgngtacttttgaaaatgatacaaactaccttggttgtaagaagtgcaggttgaacactttaggagaacagtcttcaaactggcaattcaaaatttcccattatatgtgaataaaattggaaggatgttaaatgtccatggaaagttactcttgtaagttaggatgccttatactgaggctttanaatgaaagtacacttcacaaatggaatagtgaacataaattaccagaagtcaagataatagtcatactagtaaggtaagcaaggtaaattcccttatacacaaaaattattttgatgacctttttcaataatgaatctgaaatgaagtgttttaaaaagctccctaaacacaaaacgaacataaaactgcttaataactttagagctcatgtaatattcttgctgaaaacagttactgaaattaccagcgaaatgatggaatatctttaaagcaggncactcngtataatctggaataatttcatttgctaacttttaagaagtattctctggactataaatcntgggcaaatagacttccactttattattaccccaaatta

SEQ ID NO: 456 - DNA, 467 bp, Homo sapiens
  misc_feature 358: n = A,T,C or G
cctggacctgtgtaaaccttcaaacactcttttttacattaggtcgtgaagttaaattttttactgtttctgtgctacagactcttcaaagggaaatagttaagtcaatttcaaagaaaatgaccagcacatttttaaaacattagaaatgatttgactttgactatctactgccaaaaaaaggttaaggaatttgtaatgagaagctaaaaactttaaggaattttaaggaactcaaaacaaaaactcattaaatgtaattaaagtgaattctacaaataaagcctcttaatacatttctataatagtcacttaagacttaaattcaaacactagcaaaccacaaaatcagactgtntgactgacatccaaaagataaatataaatcaaaatccgaccccagcattagccaaggggtaggtgttcctcttgaggaaggcaggaattcctcttctgccacctgttgg

SEQ ID NO: 457 - DNA, 183 bp, Homo sapiens
  misc_feature 10: n = A,T,C or G
ccaaattttntactttaaacactgaaaacagaggaagttaataaaaattttaacctataaagtcccctggttgttagtcattaacagcagattgtcagataagactggtaaaatgatggctgctaagcatttgatgatccaggcgcaggatgatcaaactgcagcagatcatgcacgtgacag

SEQ ID NO: 458 - DNA, 445 bp, Homo sapiens
  misc_feature 324, 372, 388, 396, 431: n = A,T,C or G
gaaaaatataaagccaaaaattggataaaatagcactgaaaaaatgaggaaattattggtaaccaatttattttaaaagcccatcaatttaatttctggtggtgcagaagttagaaggtaaagcttgagaagatgagggtgtttacgtagaccagaaccaatttagaagaatacttgaagctagaaggggaagttggttaaaaatcacatcaaaaagctactaaaaggactggtgtaatttaaaaaaaactaaggcagaaggtttttggaagagttagaagaatttggaaggccttaaatatagtagcttagtttgaaaaatgngaaggactttcgtaacggaagtaattcaagatcaagagtaattaccancttaatgtttttggcnttggactntgagttaagattattttttaaatcctgaggactancattaatgggacag

SEQ ID NO: 459 - DNA, 426 bp, Homo sapiens
  misc_feature 10, 345, 363, 400, 401: n = A,T,C or G
cctatgatancttctctagctatcatactccaatcagcaaaaaatgagaaaatgttgagaaatagaagataattcctcatttaaggccaccttctagaatttgtgcttaagattctgctttcttctcatgggccagcacttcggcaactggcaaaaattaggtgtacagggatctaggtaatactgtttatttgagcaataatatattgtgctaacgttcaggcatcctattactgagaaataagggaaaatgagtgtaaagtacaactaagagtctcggcgacagggaaaaataccatcagttaaatatccatagtcctagagcatttatgtaaaactgcaatntgaatcctgcaatacatnttggctttttccctcagtgataccatgtgagggaagnngctctgtcaaggcgggccggataga

SEQ ID NO: 460 - DNA, 348 bp, Homo sapiens
  misc_feature 147, 184, 203, 288, 294, 308, 312, 313, 316, 333, 345, 347: n = A,T,C or G
ccaaattttaaaatgttatttttcatatcatttataaccttgtcacaatccacttaaagaagtttggttatatttcactgaaaattttcttccagagtaggttttttttcgtgggttggggggtaactttactacaattagtaagtntggtgcagaatttcatgcaaatgaggagtgcagcagngtgataatttaaacatatntaaacaaaaacaaaaaaaatgaatgcacaaacttgctgctgcttagatcactgcagcttctaggacccggtttcttttactgatntaaaancaaaacaaaaaaantaannacnttgtgcctgaaatgaancttgtttttttntna

SEQ ID NO: 461 - DNA, 378 bp, Homo sapiens
  misc_feature 370: n = A,T,C or G
ccactaagacagaacggaatctagtagaagtgcaccaatgcttcagtccctcctactcagcatggtgagcagtggtcaatctgtgccctgtggaatgatgggcagataattctggcatgtgtaaataataataaataattcacttggtgcaggcagtatgtctatgaattaaaacctagtgtgtacacagtgcctacatgtgttacagccccacagtaggaatctacaccaaaatatttattagaaggaatttggtccgtactacatcacgctttccggagggtaaaaaataaagtccatctatagacatttcaccacagacccagagactgagtctggctaaaacctgcaaaatgtctataacaaaagnggatggct

SEQ ID NO: 462 - DNA, 197 bp, Homo sapiens
  misc_feature 59, 72, 81, 99, 105, 112, 120, 137, 140, 155, 158, 163, 182,190: n = A,T,C or G
gcgaggtccacactattaaaagctgttgggtaattgaaggtgatataaaatgactgtcntcatttggagtgngcagcacanttacttcatgttgctcangtttanaacaatntcccctgnaagttctcacacagatnggnagaaatcatacctanttntggtnaatcactatggcagccgtngaagaatntaagaga

SEQ ID NO: 463 - DNA, 279 bp, Homo sapiens
  misc_feature 13, 18, 26, 28, 43, 164, 175, 200, 201, 203, 219, 222, 230,246, 262, 263, 267: n = A,T,C or G
cataagtgatgangaggnaaaatcantnaataagcctacaacntagaatacattaaaacttgcacatatacatgttcacagcatgtatacaatgataatccctacggtttaaccaagttatggttcccttctacagcagacacaaaaccaaggtgaactaggtnggcagatgtanagggaataccaaaaaaagggtaatnngntcactgattctgaagnatntgactgancatactgagcttctgnactttgggaatgcatnnaggnaacaatatcttg

SEQ ID NO: 464 - DNA, 552 bp, Homo sapiens
  misc_feature 266, 287, 395, 444, 460, 481, 487, 493, 512, 520, 532, 549: n = A,T,C or G
gatgggttgataggtgcagcaaaccaccctggcgcatgtttaccaatgtaacaaacctgcacatcctgcacaggtactccaaaactaaaagtaaaaaaatctaaaagaaaaaagaaaaagaattaaacccaaaatcacttccccatctggacttgatttagatgaaaagcttctggactttgagctgatgctatagtgggttgaaaattttggggtcctcagaaggggatgaggatatattgcatgagagagcaacatgaatcatngagagccagagtatagagagnggtgggtagactgtaggagagccctcaatgatcccggctgtcttgtattcgcgttgcacttacttgtataatatggcagatgggatgtgatgtcactttcaagattangttataaatagactatggcttcaatcagagggttttcttctctgtctanctctcttttgggtagnttcattctgagagaaagccanacctcngccgcnacccacgctaaggggcganttccagcncactggcggccngttactagtggatccgngct

SEQ ID NO: 465 - DNA, 444 bp, Homo sapiens
  misc_feature 124, 326, 360, 369, 388, 394, 399, 413, 415, 438, 443: n = A,T,C or G
ccactcttggtagaaaccttgaaactttcaccttgctgggctttagcaaagtttccttttacagttctgtttatgagcttcagctactgataaagcacttcctgaacttctctattatcatagngaccctctgaataacctgagtgactggctcggcaattcgctttataaccattcttattcccaaagttggagcacataaacatttagatgtcttttcctgtaaaatattctagacatttacccaaactctagttcaacatatactcaacttgcactgtatatctccctgcttttttgagacagagaagaaattcaggaggtgncccatctccagagtttctctgttggaaagcagcnatcaagaancctttaaaaaattggtgtnaagctntgccncctgcagaaatgcntngccccacattattcttctggggnaaagna

SEQ ID NO: 466 - DNA, 381 bp, Homo sapiens
  misc_feature 265, 325, 326, 338: n = A,T,C or G
cctactatgggtgttaattttttactctctctacaaggttttttcctagtgtccaaagagctgttcctctttggactaacagttaaatttacaaggggatttagagggttctgtgggcaaatttaaagttgaactaagattctatcttggacaaccagctatcaccaggctcggtaggtttgtcgcctctacctataaatcttcccactattttgctacatagacgggtgtgctcttttagctgttcttaggtagctcgtctggnttcgggggtcttagctttggctctccttgcaaagttatttctagttaattcattatgcannaggtataggggntagtccttgctatattatgcttggttataatttttcatctttc

SEQ ID NO: 467 - DNA, 95 bp, Homo sapiens
  misc_feature 7, 11, 15, 46, 69, 74, 77: n = A,T,C or G
cctatanattntggnttgtatactgggtcctgaaaaccctcttggngctctgtttttaaggagctgaanccaangancgccaataataatacttt

SEQ ID NO: 468 - DNA, 224 bp, Homo sapiens
cagtgggtctctgatgccttgcctgcagcagaaggagggagcagagatcaagaggaaggaaaaaatcatatgtacttatttgaaggtaaagattattctaaagagcccagtaaggaagacagaaaatcatttgaacaactggtaaaccttcagaaaacccttttggagaaagctagtcaagagggccgatcactccgaaataaaggcagtgttctcatcccagg

SEQ ID NO: 469 - DNA, 416 bp, Homo sapiens
ctgagttctagttcaaaagctttatccttaacttcgtcatgtactatgtaaattctagaatagaaaagggaaaggtaagattttggtaacctccaaacattgaagtagttcacagacccaaagtcagtacaaattagaatgtccatccataataaaagtatctataaaattacacagacacattctacatagtatttaacattagagaagacaaattacacagggactgaaataaaatgaaacatctactctcccgacaaatgttgaatatacctaatcaacccaagttcagtttatttttgcacattgctttagagatataacttggctgggcacagtggctcacacctgtaatcccaacactttgggagaccaaggcggatggatcacttgaggtcagttcgagactagcctgg

SEQ ID NO: 470 - DNA, 376 bp, Homo sapiens
caccttttaactgtatcacaaagtctgttgctgtggttacagcctttgtttccagtgatgttttgtccatgctttcccccaacccttaacaatggttactcaaaagaatgaaataatgagtcattcattcgggaatatgttaaaatatccctctttatcattacatttcactgcttagaaactaggctgtaattcaaggcaacagttaagtctgagaactgttaaaaaaatctttgattttttttcatttttaagaaaaacctgcctatttaattgttcagacttgtaagaggttcttcaattacatcctttttggttaatgtattatttctggaacaagtagataaaattctacgcagtaagcataataaaaatc

SEQ ID NO: 471 - DNA, 357 bp, Homo sapiens
ggcttcgtataatggttcttttgtcacccctgatcgacgatttcgctacccgtacaactctgacaagggaacgaaatgcttctgtgtattcacctagtggtcctgtgaacagaagaacaacaactccaccggatagtggagtactgtttgaagggttaggcatttcaacaagacctagagatgttgaaattcctcagtttatgagacagattgcagtaaggaggccaactacggcagatgaaagatctttgcggaaaattcaagaacaagatattattaattttagacgaactctttaccgtgctggtgctcgagttagaaatattgaagatggtggccgctacagggatatttcag

SEQ ID NO: 472 - DNA, 557 bp, Homo sapiens
  misc_feature 2, 29, 213, 428, 515: n = A,T,C or G
cngagatgacatttacaatctcttgaaangcagcagatggcactctggtgcttcctatgaagcaacatgcttgaaatcaagggccaacaattgttgtaggaaagcaaaatatacctctaacacctacgtttaccaaaaaagctgacatctcaaactctgagttgttgagactcaaatttctcatccccaaagaagcctattacggtagtgtgntggatgctttttgtatctctgataggcaggcactataatggggggaaatacttctgaataaaaacattggctgtcttgcaactgtgcatataatgtctattcaagggggcagtgtgcctagcatgatcctgaaatgttgagataaaaggaagttggcattaaagcactatttgtcttatatgaaaagagtgactctatcttccagtaaacaaganttcctgcaatgaaaaagaaattttttccttcattatctataaactatacaaaataaccttcctttttaacctaagactcaaacattnatatttgattttattctatttgataccaattggtatgtccag

SEQ ID NO: 473 - DNA, 264 bp, Homo sapiens
cctccatcaacagaaaggataaagaccccttcgggtctcctcattaattctgaactggaaaagccccagaaagtccggaaagacaaggaaggaacacctccacttacaaaagaagataagacagttgtcagacaaagccctcgaaggattaagccagttaggattattccttcttcaaaaaggacagatgcaaccattgctaagcaactcttacagagggcaaaaaagggggctcaaaagaaaattgaaaaagaagcagctcag

SEQ ID NO: 474 - DNA, 165 bp, Homo sapiens
aattcagcttccagaggcccttattagtccttgttgacagaaacatagatttggcaactcctttacatcatacttggacatatcaagcattggtgcacgatgtactggatttccatttaaacagggttaatttggaagaatcttcaggagtggaaaactctccag

SEQ ID NO: 475 - DNA, 417 bp, Homo sapiens
  misc_feature 370, 372: n = A,T,C or G
aagttctcttcttgttttaaacacattcctgataacttctaaagatgaccaaaataaaacagaatatctacagagatcattttctgaattttttgtacatccaaggataacaacataaaaaaaataaaactggacagcattccacatccaagtgcacagaaccatttttgcaagattaaataatgtaaacattgggaacagccaaatcagcgaagaatgccaacacctcaaaacacctggtgttgccgcttcattaagtggttcaaaatccagatctataattgcgcaatattcaccgtatataaaaagaaatggatattaattttgacaaatagctgcaactgagacttctttttatttctttatatgngnatatagtgaatttttattatttttaaaattttatttattttttta

SEQ ID NO: 476 - DNA, 321 bp, Homo sapiens
  misc_feature 36, 87, 102, 158, 170, 193, 196, 263, 291: n = A,T,C or G
catttaataacaaaaacaacctgtacggaaaacccnaaggcaaccacatagcatatgtaaaatgtgcaaatacactttaaaatgcangttattctatagcanttgcaagatagaatttcactgtaattagggaatctagctcatcctaacttaatagncttttgcatgtntagacaatgcaattctacaaggnacnactcagcgttgatgctaaagtatgaaacacatcctcagattattcatccgaaaatattaaaatagcntcatgttttattattctttaatgagtcntgagctcatttctaaagcttcataaagcat

SEQ ID NO: 477 - DNA, 546 bp, Homo sapiens
  misc_feature 546: n = A,T,C or G
gctgtggttatattgtaaatgaagcatctaacatgtgcacaacttgcaacaaaaactccttggactttaaatctgtctttctcagtttccatgtgctgattgatctgactgatcacacaggcacccttcattcctgtagtctcacaggaagtgttgctgaggagactttgggctgcacggtacatgagtttcttgcaatgacaaatgaacagaaaacagcattaaagtggcaattcctcttggaaagaagcaaaatttatttaaaattcgttctatcacacagagcaaggagtggattgaaaattagtgtactctcgtgcaagcttgcagatcctactgaggcaagcagaaacttgtctggacaaagacatgtttaaaacggtctatcattttgaactctggaaaagtataagagttttaactccctttaaaatggaatattaatttgaaaattatggggaaaattgcattttgtttacatgtggtgaacatgtttctagaaattggtatggcgggaagggggctgggtgagtctgaaggacctcn

SEQ ID NO: 478 - DNA, 100 bp, Homo sapiens
aagaaaagtggtaaaatcaagtcttcttacaagagggagtgtataaaccttggttgtgatgttgactttgattttgctggacctgcaatccatggttcag

SEQ ID NO: 479 - DNA, 508 bp, Homo sapiens
  misc_feature 2, 3, 423, 505: n = A,T,C or G
gnnttccaaattcttctaactcttccaaaagccttctgccttagttttttttaaattacaccagtccttttagtagctttttgatgtgatttttaaccaacttccccttctagcttcaagtattcttctaaattggtcctggtctacgtaaacaccctcatcttctcaagctttaccttctaacttctgcaccaccagaaattaaattgatgggcttttaaaataaattggttaccaataatttcctcattttttcagtgctattttatccaatttttggctttatatttttctatcttctatacttctccaatacttgtcttagcttgtttttcattttctatctgaaactcttgacaatatcttctaatttccctatcttctctattcttttcttcgccttcccgtacttctgcttccagntttccacttcaaacttctatcttctccaaattgttcatcctaccactcccaataatctttccattttcgtgtagcacctggncag

SEQ ID NO: 480 - DNA, 81 bp, Homo sapiens
ggtgcccttttcctaacactcacaacaaaactaactaatactaacatctcagacgctcaggaaatagataaggaaaatgac

SEQ ID NO: 481 - DNA, 306 bp, Homo sapiens
  misc_feature 30: n = A,T,C or G
tcgccttcggccgccgggcaggttaggggnacaagacgctacttcccctatcatagaagagcttatcacctttcatgatcacgccctcatagtcattttccttatctgcttcctagtcctgtatgcccttttcctaacactcacaacaaaactaactaatactaacatctcagacgctcagggaatagaaaccgtctgaactatcctgcccgccatcatcctagtcctcatcgccctcccatccctacgcatcctttacataacagacgaggtcaacgatccctcccttaccatcaaatcaattgg

SEQ ID NO: 482 - DNA, 582 bp, Homo sapiens
  misc_feature 92, 155, 262, 369, 393, 413, 430, 451, 452, 460, 463, 467,471, 474, 486, 516, 554, 558, 562, 565, 569: n = A,T,C or G
ggggggaacagtcattatacattatttagactcattccttcttccagtgcccttatgattatttcctacctttaccattgatcttaaactgngcaggctaaaaagaggaaccagaactcccttaagcacttttaagactatttaaaaaataaagntttgttggcattgaagagtaagctgcttaagggactgaatgaaaagatagtaccctttgtggctgtatgaagagagaaactgaatttctatccaagagaccttaatntagcctattagggaattatcttccccaaaagtacaagtaattttgcactgcaggagaaggataagtagatttgatttacatcacattttatacacacctttcaaganggagaaatctgcttcataaatagnaggaatctatgcttaaactnaacatttaatggtgacntcttacaacagccttgaaaannattggaantcngacntganggnggaaactggaanaaagaatatctttctcttctgcatcctttnatcctcaaacttagcatggattcacacgctgaggaaangttnggtnacnaccngaacatttagata

SEQ ID NO: 483 - DNA, 275 bp, Homo sapiens
  misc_feature 251: n = A,T,C or G
gcctcactaaaataacagatttcagtatagccaagttcatcagaaagacccaaatggaatgatttacaaaatagaacactttaaaccaggtcagtcctatctttttgtagctgaaggctatcagtcataacacaatttcgcgtacacctctgctcattatggaattacacttaaaacgaatctcaagagggtgaccattgttgtttcagataccatccctaaggagagtggttaacaggaagattgccagngttactgatggaaagaagcgcttg

SEQ ID NO: 484 - DNA, 434 bp, Homo sapiens
catatttccacaggccaatttctttctgtttttctgctaagctatttcagcattttagcttttcctctttgctttgtttactcatgattgccagatggctacgttacctctaagcatcagatcctcacaaattaatggttaaatgtaagggagggattttactctcttgcattaaaaaaaagctttattgagatataatttactgtaacattgactcatttaaagtatgctagtcaatagaccaaatcttgaataaactcccattcacaattgctacaaagggaataaaatagctgggaatatagctaacaagggaagtgaagggcctcttcaaggagaactacaaaccactgctcaagaaataagagaggatacaaacaaatggaaaaacattccatgctcatgaataggaagaatcaatatcgtgaaaatgg

SEQ ID NO: 485 - DNA, 291 bp, Homo sapiens
  misc_feature 1: n = A,T,C or G
ncaccactgcagccctacatacagttgaaaaaaaattccattctgttaacatttgttttataagttttcacgcaatacacaaaaaacccctctgcacttcttgtaaagaacaaaaaagatacacaacagttaagcgtaaagatcacaggcaatagcattcaaacatggatgtgggtagagaaaggagtacctggcatgagtacctgcttagtttgactgaatccttgatttttaatttggcttttcatgggccgctcacaacaccaacgctgtgtgaggtatggtagtcag

SEQ ID NO: 486 - DNA, 274 bp, Homo sapiens
ctgtaatattgtagttgctccagaatgtcaagggcagcttacggagatgtcactggagcagcacgctcagagacagtgaactagcatttgaatacacaagtccaagtctactgtgttgctaggggtgcagaacccgtttctttgtatgagagaggtcaaagggttggtttcctgggagaaattagttttgcattaaagtaggagtagtgcatgttttcttctgttatccccctgattgttctgtaactagttgctctcattttaatttcactgg

SEQ ID NO: 487 - DNA, 184 bp, Homo sapiens
  misc_feature 86, 132, 137: n = A,T,C or G
tggcaccaagattctcagctcacggtaccagcatctgattgtcggactacctgctgctttccctgatatttatacatgatattcgnaaaatgtaaagaagctattattcatacagacatctagagaaggagngaagnttttaaaaaaataaaaaaatacttatttcaagctttagctgtgttct

SEQ ID NO: 488 - DNA, 393 bp, Homo sapiens
ctgcatttttattgcgatctgcagatgaactggaaaatctcattttacaacagaactgggacagacgaccaccatattcactgaggtctaaatttgcagtttccactaatgacattttgatttcccaacagagatacttctggtcttactgcacagtcttttaagagaaatacttccattatgccacattgtccttgatccgtaagtgatgtgttaaggtgcttcaaaggaactctgacctctgaagtacttgagctactttagtatgtccagcctattgctttttgttttagtgtgtcaccataaatatcaggggcataaaaggctatctattcttaattcaaggataaaacagaagaagcttgtggtataaaacaatagttcaagatccag

SEQ ID NO: 489 - DNA, 607 bp, Homo sapiens
  misc_feature 46, 270, 440, 515, 558, 579, 580, 602: n = A,T,C or G
gtgcttatgtacttaaggggaactactctaactgggtgaagagtangatgaagcatccatgtccctacaaaggatatgaactcatccttttttatggctgcatagtattccatggtgtatatatgccacattttcttaatccagtctatcatcgatggatatttgggttggttccaagtctttgctattgtgaatagtgtcgcaatgaacatacatgtgcatgtgtctttatagcagcatgatttataatcctttgggtatatacccagnaatgggatagctgggtcaaatggtatttctagttctagatccttgtggaattgccacactgtcttccacaatggttgaactagtttacagtcccaccaacagtgtaaaagtggtcctatttctccacatcatctccagcacctgttggttcctgactttttaatgattgncattccaactggtgtgagatggtatatcaccgtgggtttgatttgcatttccctgatggccagtgatgatgaacnttttttcatgtggtttttggctgcataaatggcctgccttttntacttctataaaatttttcanntcttattattattcctgggggnttaag

SEQ ID NO: 490 - DNA, 179 bp, Homo sapiens
  misc_feature 76, 102, 131, 169: n = A,T,C or G
cttctaggaatactagtatatcgctcacacctcatatcctccctactatgcctagaaggaataatactatcactgntcattatagctactcccataaccctnaacacccactccctcttagccaatattgngcctattgccatactagtctttgccgcctgcgaagcancggtaggacc

SEQ ID NO: 491 - DNA, 399 bp, Homo sapiens
  misc_feature 41, 156, 371: n = A,T,C or G
cctctacctgtaatcacattaatttttctaaagacaggggnggtgttttgaagataaatgtcattagtctatgataatagcatcataggacaattagccattttagacttgaccatattttctctttttagcatatagccatcttgatatttaggngggagactactccaatggagcaacagtttcattttacatgattggatttagaaatttacaaattttaaactcataagaattctaaataatttgaaaatggaaacatttgacccacagtctagcagcataaatacatttataaaatacttcattgttgatcttaggtcattgatttaaaacagaatttggtgactatgggcaggtggagggggccngtgaggaaggtataaaagagaaatcttt

SEQ ID NO: 492 - DNA, 482 bp, Homo sapiens
  misc_feature 39: n = A,T,C or G
ctccaccttactaccagacagccttagccaaaccatttncccaaataaagtataggcgatagaaattgaaacctggcgcaatagatatagtaccgcaagggaaagatgaaaaattataaccaagcataatatagcaaggactaacccctataccttctgcataatgaattaactagaaataactttgcaaggggagccaaagctaagacccccgaaaccagacgagctacctaagaacagctaaaagagcacacccgtctatgtagcaaaatagtgggaagatttataggtagaggcgacaaacctaccgagcctggtgatagctggttgtccaagatagaatcttagttcaactttaaatttgcccacagaaccctctaaatccccttgtaaatttaactgttagtccaaagaggaacagctctttggacactaggaaaaaaccttgtagagagagtaaaaaatttaacacccatagtagg

SEQ ID NO: 493 - DNA, 207 bp, Homo sapiens
  misc_feature 35, 37: n = A,T,C or G
cataaatattatactagcatttaccatctcacttngnggaatgctagtatatcgctcacacctcatatcctccctactatgcctagaaggaataatactatcactgttcattatagctactctcataaccctcaacacccactccctcttagccaatattgtgcctattgccatactagtctttgccgcctgcgaagcagcggtagg

SEQ ID NO: 494 - DNA, 283 bp, Homo sapiens
  misc_feature 38: n = A,T,C or G
ccaattgatttgatggtaagggagggatcgttgacctngtctgttatgtaaaggatgcgtagggatgggagggcgatgaggactaggatgatggcgggcaggatagttcagacggtttctatttcctgagcgtctgagatgttagtattagttagttttgttgtgagtgttaggaaaagggcatacaggactaggaagcagataaggaaaatgactatgagggcgtgatcatgaaaggtgataagctcttctatgataggggaagtagcgtcttgtagaccta

SEQ ID NO: 495 - DNA, 590 bp, Homo sapiens
  misc_feature 584: n = A,T,C or G
tatgtatataattttcttagttactagcatagagaaattactgatttaaaaaaacatttcaaattctagcatgttgtaggattctattgccctttctaaaaagtacatcttgcttatccgatttctaacaaaactatttaatttgaagaagggagaatgaatttggataaaaagcaaaaatttaaaggtactcaaatttaggcaaaccattaaagcaatcttagtttacagttaattgggtagaatggtcaacactttcttcaggttagttcatggagtggatatgcattgatagaacaacttagagatgcttttacagttgagaaagctcattatatttgttatctttaagaatcagcttatttatttcatatgtttgttctttaagaagaccaaagagccctgcaaatgaatgttgatttgtttttttgtttgtttaatatttttgtagagataagatctcactttgttatgttgcccaggctggtctcaaactctcaacttgaagtgatctgcccacctcagcctcccaaagtggtgggattacaggcatgagccaccgcacctggacctgcccgggcggncgctcg

SEQ ID NO: 496 - DNA, 307 bp, Homo sapiens
  misc_feature 20, 22, 25, 34, 118, 119, 155, 167, 169, 178, 188, 201, 212,230, 245, 259, 260, 268, 300, 307: n = A,T,C or G
ggagattagtatagagaggnanacnttttttcgngatatttggtcacatggataagtggcgctggcttgccatgattgtgaggggtaggagccaggtagttagtattaggaggggggnngttagggggtctgaggagaaggttggggaacagctnaataggttgttngntgatttggntaaaaaacantagggggatgatnctaataattantgctgtgggtggttgtgntgattcaaattatgngctttttcggaganncatgtcangtggtagtaaatataattgttgggaccattanttcttan

SEQ ID NO: 497 - DNA, 216 bp, Homo sapiens
  misc_feature 34, 35, 37, 124, 150, 176, 179, 183, 185, 188, 200, 203, 213: n = A,T,C or G
cattttcctcttggtttcttcagttaagtcaaanngncacgttcctctttccccatatattcatatatttttgctcgttagtgtatttcttgagctgttttcatgttgtttatttcctgtctgngaaatggtgtttttttttgttgttgntggtttttttttttttttttaaactnggnaccncnaanttgaaaaaatgnttntttttccctnaca

SEQ ID NO: 498 - DNA, 375 bp, Homo sapiens
  misc_feature 36, 37, 155, 227, 239, 242, 253, 279, 283, 286, 325, 330,337, 340, 349, 356: n = A,T,C or G
gaatttcctggcaccttttctcgctagagaagattnngtgtgactgggttgcctataagccatatagatacaaacttttatctctaataccaagtcttagagggatatattaatagatctaataaatttattcttagacttattgtttcatgggntagtgagtctttgctactggagacaatacagacttgtcagtttttttaaaaaaaaaaaatttgccaagctancacattaaaaanatntcctaaggctntcattttatgaggatgattataaacntttntgngataaatatcaccataataaactgttaagtacaactgcnggccncccttanagngaattcctncagttanaaatttatttttttgccaa

SEQ ID NO: 499 - DNA, 215 bp, Homo sapiens
  misc_feature 5, 39, 40: n = A,T,C or G
ccacnaaagcagaagcttaaagcatagtagtaaagaggnnaaaaagaaggacgaaaataaatcagatgacaaggatggtaaagaagttgacagtagtcatgaaaaggccagaggtaatagttcactcatggaaaagaaattaagtagaaggttgtgcgaaaatcggagaggaagcttgtcacaaaaaaaaaaaaaaaaaaaaaaaaaaatgtttt

SEQ ID NO: 500 - DNA, 489 bp, Homo sapiens
  misc_feature 38, 239: n = A,T,C or G
ccactacgataagcaggtagctgggttttgtagtgagnttgctccttaagttacaggaactctccttataatagacacttcattttcctagtccatccctcatgaaaaatgactgaccactgctgggcagcaggagggatgatgaccaactaattcccaaaccccagtctcattggtaccagccttggggaaccacctacacttgagccacaattggttttgaagtgcatttacaaggnttgtctactttcagttctttactttttacatgctgacacatacatacactgcctaaatagatctctttcagaaacaatcctcagataacgcatagcaaaatggagatggagacatgatttctcatgcaacagcttctctaattataccttagaaatgttctcctttttatcatcaaatctgctcaagaagggctttttatagtagaataatatcagtggatgaaaacagcttaacattttaccatgctta

SEQ ID NO: 501 - DNA, 286 bp, Homo sapiens
aaaaacactcaaacacagccttggagggaggagtcagttttaaaagactcttataaaagtaatatactgctagctctgaagaatcggaggctaaaatcatctcttcaagtccccagggaatcccaaagaactccaggggaaggtgggatgggccagagagctctggaagcttccaggtctgttgcaagcctcacctggtacacagtaggctcttccaggtctgtcaggaacccaggagcctcccctagcacacagtaggctcacaaaaagggagcactgctgctgg

SEQ ID NO: 502 - DNA, 168 bp, Homo sapiens
  misc_feature 38: n = A,T,C or G
cctatgattgtgggggcaatgaatgaagcgaacagagnttcgttcattttggttctcagagtttgttataattttttatttttatgggctttggtgagggaggtaagtggtagtttgtgtttaatatttttagttgggtgatgaggaatagtgtaaggagtatggggg

SEQ ID NO: 503 - DNA, 173 bp, Homo sapiens
  misc_feature 34, 35, 43: n = A,T,C or G
cctttataataaattaggcaaaaggttcagtgcnnggctatantggacaacatgaaactccataaaaatgactggatagggggactgcttgagacttttcttttgggcattactaacagaattcaaagaaattccaaccacgcttatttttccaaattctactgaaatgagag

SEQ ID NO: 504 - DNA, 310 bp, Homo sapiens
  misc_feature 127, 259, 273: n = A,T,C or G
tagtattctatttaaaaattaagttttggggtctgtaaaatatacaggacaatgacttttttaaaatgtaagttaatacctcctcctcacttgtcttaattgaacttaggtgtttattcttaaaggnggaccttgatgaaaatgttgagatgggaagtgttattaggcaaaacttgttatagatttctcatataactcttaattgacccttagaattttaacaaccgcgcctggcccaatagactgttttttagagtanttttaggctctcancaaaattgaggggaaaatacagggtgttcccattaaa

SEQ ID NO: 505 - DNA, 530 bp, Homo sapiens
  misc_feature 527: n = A,T,C or G
cctcagggaacttacaattatggcaaaaggggaaggggaagcaagcaccttcttcacaaggcatcaggagagagagagaaagagagtaggggaaactaccccttttaaaccatcatatcctgtgagaactccctcagtattagaagagcatgagggaaaccgcctccataatccaatcacctcccaccaggaccatccctcaatacatgggggttacaattcaagatgaggttcgggtggggatacagatttaaaccatatcagaatggttaatgatattgttgtattttaccaactataatcttcttagtgttatagtacaataatgtaaaaaattgagtaaatttgttttctatattattctgtttttggaaaacatgtatatagtcagggctgtttgtctcaagaaaatatggtaaactctgctgttttggtcactggtgcctagaatttggggatgtacattggttttgattcacatgcacatttccttctagttcacagtaactatttctaactatttcccnata

SEQ ID NO: 506 - DNA, 352 bp, Homo sapiens
  misc_feature 50, 175, 336, 337: n = A,T,C or G
cttgaacgctttcttaattggtggctgcttttaggcggtactatgggtgntaaattttttactctctctacaaggttttttcctagtgtccaaagagctgttcctctttggactaacagttaaatttacaaggggatttagagggttctgtgggcaaatttaaagttgaactaanattctatcttggacaaccagctatcaccaggctcggtaggtttgtcgcctctacctataaatcttcccactattttgctacatagacgggtgtgctcttttagctgttcttaggtagctcgtctggtttcgggggtcttagctttggctctccttgcaaanntatttctagttaatt

SEQ ID NO: 507 - DNA, 370 bp, Homo sapiens
  misc_feature 35, 186: n = A,T,C or G
cctaactagatcttatcagaataggggggaagggngtcggttcatccttattgagtgttaatgaccctgtaagatgtaatttcttttatttcattctgttacctagaaaatctatcacagccttgtagtattgattgctcaatctataaagagctcagtttacagcatgactgttagtaacagggntattttaatgagtgactcttcaacacctcagagtttcactaaattccaacccatcagcccagtagtctaacattaagggtcttaggaaatgagaacttatcacctttccttatcatgaaaaggtaacctccaggtaaccaaaaatagaacttcctctgtgttcgttttttatagaaattactgg

SEQ ID NO: 508 - DNA, 129 bp, Homo sapiens
  misc_feature 37: n = A,T,C or G
ctgttaaaagaacaaacttagcaatatataacagttnggtaacaggatttttgactattcactttgggagttatttttaaaaatccacttttttactgagtcttactacataccaggcactgtacttgg

SEQ ID NO: 509 - DNA, 422 bp, Homo sapiens
  misc_feature 1, 52, 105, 107, 166, 176, 197, 232, 239, 241, 252, 255,280, 365, 416: n = A,T,C or G
ntgggaagtcgtgacatccatgggaacccagcgctgtgatgctggtgtttgngttctccgcgagaagtgaccattgttggagcaccatccagagctagtgaccantncagtggacagttagtgggagaatcaaaaatcctttccagaatgtctgtttctcactacntgcaccgggngattacaggcaccagtgcagngatgattgtacttatttgacacatactccccgtcntcctggntnttgttcctganaanggtgggtaaatattccaggaaaaanaatgcacattgaatggatgtgagagaccacattgcctctcccactgctttggggagcactttcctgtcatttctaacttaccacntgcttggtgtactatatgtatgttgtgcctcatatgttgcaaagaactaangtgagt

SEQ ID NO: 510 - DNA, 238 bp, Homo sapiens
ccacctatgaattggtggtttacctactcaatggatagcagcacgaggactgctgtactgcacaaaaagaagaccaaaagattacagtggaccatgggatacagaagccagcatggcagacagaagaaaaatagtttgggaacatgtaactatcctaagtggaagttttgttgtaggaattatagtaatcacaccacattacttggcctttcggtaatgtgaaaaaaaaaaaaaatcc

SEQ ID NO: 511 - DNA, 254 bp, Homo sapiens
  misc_feature 3, 34, 169, 228: n = A,T,C or G
ccnattgatttgatggtaagggagggatcgttgnggctcgtctgttatgtaaaggatgcgtacggatgggagggcgatgaggactaggatgatggcgggcaggatagttcagacggtttctatttcctgagcgtctgagatgttagtattagttagttttgttgtaagngttaggaaaagggcatacaggactaggaagcacgataaggaaaatgactatgagggcgngatcatgaaaggtgataagctcttct

SEQ ID NO: 512 - DNA, 269 bp, Homo sapiens
  misc_feature 38, 49, 103: n = A,T,C or G
cctacctgtaaactacagtactttatatatctatgggnttaataaaaanaaaatccacaaatcttaaaaaggaactttaaatgcagggctatattgaattggnaaactgcaacacaaactggcgcaacataggtaaatgaataccaatctcactctatgtgatgcaagcatgctactttcccactaatttaaattactttcaaccactatgagccagaatgcatgcctgaaccttaaactgcactttaaaaagtaacatcttggcctaa

SEQ ID NO: 513 - DNA, 266 bp, Homo sapiens
  misc_feature 34, 79, 137, 149, 154, 157, 217, 245, 251: n = A,T,C or G
ggaggggggttgttagggggtcggaggagaaggntggggaacagctaaataggttgttgttgatttggttaaaaaatantagggggatgatgctaataattaggctgtgggtggttgtgttgattcaaattatgtgntttttggagagncatgncantggtagtaatataattgttgagacgattagttttagcattggagtaggtttaggttatgnaccgtactctaggccatatgtgttgganattganactagtagggctagg

SEQ ID NO: 514 - DNA, 271 bp, Homo sapiens
  misc_feature 9, 32, 33, 39, 51, 52, 61, 62, 65, 75, 108, 112, 120, 123,127, 129, 132, 141, 142, 157, 173, 179, 210, 219, 220, 224,231, 232, 235, 240, 242, 245, 251, 259, 266: n = A,T,C or G
acatgcaanaaatcgagaatcttaaaaaacannacgaanctgccctggaanncttactggnntangatatttatnttgcggctgagatacttgaacaacttcggatcngaantagacaanaangggnanttntatactgcnncagaggttacacagntcattgtattagagangaacanatgggtctggtgttcacacattggggggaanatgggcgtnnacangagaggnnganaaacnanganagcctncctggttngcataanaaaaa

SEQ ID NO: 515 - DNA, 328 bp, Homo sapiens
  misc_feature 23, 25, 32, 64, 112, 125, 149, 157, 202, 216, 245, 256, 267,297: n = A,T,C or G
ccaatgaggggcaaagtgagcgncnagaagangttttgactgaaataaatcaaacacaaaaatntaagttcacagtgacagtttaaacaaaatccaaacaaactaacaacanaaacaccccttgntttgcctctagtggaaggtggganaacacaanctcgtcctaaaaattgactagtaaaggggaaaacccggtcatttncctactctttccangaaatatctaatgcaagaaagaacttctnctcattatacngaaggaatttngaaaaatgatgtatttttggaacacctaantgaaatactggaacctgggcaagttcaccac

SEQ ID NO: 516 - DNA, 220 bp, Homo sapiens
  misc_feature 1, 5, 52, 118, 162, 168, 174, 195: n = A,T,C or G
ncctnagttgaaggaccccatgtacatacaggccaggggagcagtactaggntaactagaaggatctcatccccatatgtgggctcatttcaagtctatggatgactaccttcattgntgtgtgcgagatggtttcaccccttgaaaatatgggcacttcancataanatagcnaaatctttataatgatcaatncatcctacctccttttacatgcatg

SEQ ID NO: 517 - DNA, 296 bp, Homo sapiens
tgcgatttcttccttgttgtttgctttggtctgtgttcaatccagagagcttaaattgtcattattttgggaagaaaacctgtatttttgttagtttacaatattatgaaatttcacttcaggagaaactgctgggcttcctgtggctttgttttcttagtttctttttccgtgccgtgtattttttaattgatttttcttcttttacttgaaaagaaagtgttttattttcaaatctggtccatatttacattctagttcagagccaagccttaaactgtacagaatttccactg

SEQ ID NO: 518 - DNA, 299 bp, Homo sapiens
  misc_feature 36: n = A,T,C or G
gaagatagaaaaatataaagccaaaaattggataanatagcactgaaaaaatgaggaaattattggtaaccaatttattttaaaagcccgtcaatttaatttctggtggtgcagaagttagaaggtaaagcttgagaagatgagggtgtttacgtagaccagaaccaatttagaagaatacttgaagctagaaggggaagttggttaaaaatcacatcaaaaagctactaaaaggactggtgtaatttaaaaaaaactaaggcagaaggcttttggaagagttagaagaatttggaagg

SEQ ID NO: 519 - DNA, 464 bp, Homo sapiens
  misc_feature 455: n = A,T,C or G
gctgcacatcggaggaaaactcggtaaagcagaatgaggttgatatgttgaatgtatttgattttgaaaaggctgggaattcagaaccaaatgaattaaaaaatgaaagtgaagtaacaattcagcaggaacgtcaacaataccaaaaggctttggatatgttattgtcggcaccaaaggatgagaacgagatattcccttcaccaactgaatttttcatgcctatttataaatcaaagcattcagaaggggttataattcaacaggtgaatgatgaaacaaatcttgaaacttcaactttggatgaaaatcatccaggtatttcatacagtttaacagatcgggaaacttctgtgaatgtcattgaaggtgatagtgaccctgaaaaggttgagatttcaaatggattatgtggtcttaacacatcaccctcccaatctgttcagttctccagngtcaaaggc

SEQ ID NO: 520 - DNA, 221 bp, Homo sapiens
ctgatatctacttatttaacacaagtctctaatacaatacaattttattaattttattccacatgccccacattagatctctagactcattcatcctacatacctactttgtatcctttgacctacatctccctacttcctcctccagtccccaccccccacccactggtgctaaccactgtttcattccctttttcattctacatatgtgagatcatgct

SEQ ID NO: 521 - DNA, 312 bp, Homo sapiens
  misc_feature 37, 38, 238: n = A,T,C or G
ctgatagctttctcttcgcctagattaatatcttctnncttcccattcacagcccccaccgacatcaaagctttgctgttttatctgtcaaaaatgtcttcacacttttcattcttaaataaaagtgctgagtaaggacattttcacaacaaatttttattttacaaaacttacaatgatttgaatccaaaacaactttcattatttaactgtaaagtaaatatatattttattaggngtgtcttagttcattttgtgctgctttaacagtgtatccttgtgatagttgtggggtgggggaggggggaagga

SEQ ID NO: 522 - DNA, 336 bp, Homo sapiens
ccttctttccccactcaattcttcctgccctgttattaattaagatatcttcagcttgtagtcagacccaatcagaatcacagaaaaatcctgcctaaggcaaagaaatataagacaagactatgatatcaatgaatgtgggttaagtaatagatttccagctaaattggtctaaaaaagaatattaagtgtggacagacctatttcaaaggagcttaattgatctcacttgttttagttctgatccagggagatcacccctctaattatttctgaacttggttaataaaagtttataagatttttatgaagcagccactgtatgatatttttaag

SEQ ID NO: 523 - DNA, 172 bp, Homo sapiens
  misc_feature 1, 5, 9, 11, 21, 49, 56, 60, 65, 66, 83, 88, 92, 113, 129: n = A,T,C or G
ngacnggcncntggctatgtntatagatagggctttaaccactatctgngaagcangagngacannattcttgctctcacatnccacngganacgtatttctcttctcttacnagcgaagaaccatctntttctaaagcccccattctattgcccttgcttttctctggctt

SEQ ID NO: 524 - DNA, 471 bp, Homo sapiens
ccagacctgcagaaaaacttagcacagctcaatctgctgttttgatggctacagggtttatttggtcaagatactcacttgtaactattccaaaaaattggagtctgtttgctgttaatttctttgtgggggcagcaggagcctctcagctttttcgtatttggagatataaccaagaactaaaagctaaagcacacaaataaaagagttcctgatcacctgaacaatctagatgtggacaaaaccattgggacctagtttattatttggttattgataaagcaaagctaactgtgtgtttagaaggcactgtaactggtagctagttcttgattcaataagaaaaatgcagcaaacttttaataacagtctctctacatgacttaaggaacttatctatggatattagtaacatttttctaccatttgtccgtaataaaccatacttgctcaaaaaaaaaaaaaaccttc

SEQ ID NO: 525 - DNA, 332 bp, Homo sapiens
  misc_feature 5, 36, 60: n = A,T,C or G
ccccnctgtattccagcctgggtgaccccatctcanggaagaaaagttaccagatgtcgngggtaaaggttggtcttcaagtggcctcataagttgtcttgcatttaaattcagggaattcattggaccaataggttacattttcgttccttttttgttttggttcatctgttaagcagtgggggcctaattactgctcctttgtaaaaacacattttcccaaagaacactgaattaccgttcaaactggttgttgatgggtaataagggctgtttttgctgccccaaaagggcttaacaatttaggcggatagtttacttaaaaaaaaaaa

SEQ ID NO: 526 - DNA, 440 bp, Homo sapiens
  misc_feature 36, 241, 258: n = A,T,C or G
ccaggttacctcccctaacagatgtggtgttctgangggttggttaagtgcccgaggaaaataggccttaactgttaacatctacagagaagaaagcatggtcacactggcaaggagtaagaagggattgggtaaaagaaaatgggagagaaaagggaaaaaagttttggcaagacaattgttccctgctaagaagctgcagggtgaaagctttcctttcttctatttttgtttttaatgnctgtctctctgatcagnggaaaagtgaaaatttctagtatctagcactaacgtatgacccaactttgagggatcacaagctagaacaagttgaggatttaaaatcctggataattatatacttaaagttcatgagcataaagctcacttgaccatgcagaaatgctgggaagcagggtgcatggcatgggaatacatct

SEQ ID NO: 527 - DNA, 124 bp, Homo sapiens
  misc_feature 30: n = A,T,C or G
tttccatatgtctgttgggtgcataaatgncttcttctgagaagtgtctgttcctatcctttgccccctttttgaggacttaaatgttagacctaagaccataaaaaccctagaagaaaaccta

SEQ ID NO: 528 - DNA, 162 bp, Homo sapiens
  misc_feature 35: n = A,T,C or G
ctgcgggagaaatatggggacaagatgttgcgcangcagaaaggtgacccacaagtctatgaagaacttttcagttactcctgccccaagttcctgtcgcctgtagtgcccaactatgataatgtgcaccccaactaccacaaagagcccttcctgcagcag

SEQ ID NO: 529 - DNA, 409 bp, Homo sapiens
  misc_feature 34, 35, 270: n = A,T,C or G
cctttaaaatatagcttataaaatgtatactatnngccaggagagctcacatttttctgcagttttccagtggacctgcctatggaatactgtaaagaaaaatctgcaaaaatattcctagcaattgaatcagtgcttttaaataaaagaagtggagaggggcttggttaaattattctgacaagttttcttgctagtggttgccaaaattaaggatatttgaagtgtcctatcacccaaatttggctttaagaaaaagctatattctgngtctatagggtgaagcccacactatctgtgctgcattctcaatgatacaatacctatctggaaactttcctgttttgccaatgggtgcacaaatctaaaacattttatcacaaaaggtacttgaatttaaatttctttt

SEQ ID NO: 530 - DNA, 325 bp, Homo sapiens
  misc_feature 39, 47, 96, 254, 264: n = A,T,C or G
ccgccagtgtgatggatatctgcagaattcgccctttcnagatttgngcccgggcaggtccatggctaggattatagatagttgggtggttggggnaaatgagtgaggcaggagtccgaggaggttagttgtggcaataaaaatgattaaggatactagtataagagatcaggttcgtcctttagtgttgtgtatggctatcatttgttttgaggttagtttgattagtcattgttgggtggtaattagtcggntgttgatganatatttggaggtggggatcaatagagggggaaatagaatgatcagtactgcggcgggtagg

SEQ ID NO: 531 - DNA, 173 bp, Homo sapiens
  misc_feature 37: n = A,T,C or G
ccaattgatttgatggtaagggagggatcgttgaccncgtctgttatgtaaaggatgcgtagggatgggagggcgatgaggactaggatgatggcgggcaggatagttcagacggtttctatttcctgagcgtctgagatgttagtattagttagttttgttgtgagtgttag

SEQ ID NO: 532 - DNA, 395 bp, Homo sapiens
  misc_feature 41, 331, 344, 369: n = A,T,C or G
caggtcctactatgggtgttaaattttttactctctctacngggttttttcctagtgtccaaagagctgttcctctttggactaacagttaaatttacaaggggatttagagggttctgtgggcaaatttaaagttgaactaagattctatcttggacaaccagctatcaccaggctcggtaggtttgtcgcctctacctataaatcttcccactattttgctacatagacgggtgtgctcttttagctgttcttaggtagctcgtctggtttcgggggtcttagctttggctctccttgcaaagttatttctagttaattcattatgcanaaggtataggggntagtccttgctatattatgcttggntataatttttcatctttcccttgcgg

SEQ ID NO: 533 - DNA, 290 bp, Homo sapiens
  misc_feature 215, 216, 237, 244, 249, 265, 267, 283: n = A,T,C or G
ctgaaccattatgggataaactggtgcaaattctttgccttctctacttctcactgattgaacataagcttccagggctcccctgaaaaccaaaatgaaaacaatgtcaaaatattagataaatcacataaaacagttaaggggataccaatatataaaaattattaggtaagctcatttctggaactgttaatgctcggtttcacaatccaagnngaccaacagccttcactcagntactggnagtgntactatggttactacngntactacctttagtgtnaaaaact

SEQ ID NO: 534 - DNA, 334 bp, Homo sapiens
  misc_feature 43, 44, 96, 126, 219, 228, 239, 248, 263, 287, 299, 310,318, 322, 323, 330: n = A,T,C or G
ccgccagtgtgatggatatctgcagaattcgcccttagcgagnnagccgggcaggtccatggctaggtttatagatagttgggtggttggtggggnatgagtgaggcaggagtccgaggaggttantttgtggcaataaaaatgattaaggatactagtataagagatcaggttcgtcctttagtgttgcgtatggctatcatttgttttgagggtagnttgattagncattgttgggnggtaattantcggctgttgatganatatttggaggtggggatcaatanagggggaaatanaatgatcagtnctgcggcnggtnngacctcngccc

SEQ ID NO: 535 - DNA, 557 bp, Homo sapiens
  misc_feature 1, 536, 538: n = A,T,C or G
nccataagcttcagtgcgcaaaaggtcaaggccagtgttaatttgttatttcttaaataactttccctttcatttttaaattataaatttaacttctaacatgttttatggttaaaattgtacttttttcctttagcgacattcaaatgcatcacaatcactttgtgaaattgttcgcctgagcagagaccagatgttacaaattcagaacagtacagagcccgaccccctgcttgccactctagaaaagtatgtgtaaaactctgttcttgttcttctttcatattgatgctgttccatgtgttaccattgtgagtggttggtaagtgttccttatgtgggaatcatgtgccttgaaaataaccttgggtgggtgagaaggtagggaaacctgcttcttttatctcaagtaaaagttttggcagggtaaagaagataaatgacatttatatctagacttttgagttttccaattatttggtaaaaatgggaaattctgtagaagcccttccttaaaaatgggggaagtccatttnanaaaattaactggtaggtca

SEQ ID NO: 536 - DNA, 372 bp, Homo sapiens
  misc_feature 37: n = A,T,C or G
gttccaaccttcatttctgaaactgttctagagcacngtgtctttctcgtagttcataacttaccccttcagtctagaattagaattacattatctgttttactactttactagactgtaagctcctagaagataaggactagggagttcatctctgtattccaccagaaggtacagtgactcatatctagagtctttagatgaaacttactgagttgaataacttaatatatttctgttttcattcccaagggaggccatgtctggagatagaccttgaatttaataaattttaggcactataccatttcagtggagaaaattgttgggaaatttggggggatggatatataagggggaggaagtcactgg

SEQ ID NO: 537 - DNA, 284 bp, Homo sapiens
  misc_feature 37: n = A,T,C or G
ccttctgatgcaaacagaaaggaaatgttgtttggangccttgctagacctggacatcctatgggaaaatttttttggggaaatgctgagacgctcaagcatgagccaagaaagaataatattgatacacatgctagattgagagaattctggatgcgttactactcttctcattacatgactttagtggttcaatccaaagaaacactggatactttggaaaagtgggtgactgaaatcttctctcagataccaaacaatgggttacccagaccaaactttgg

SEQ ID NO: 538 - DNA, 293 bp, Homo sapiens
gtacatagtaggtgtatatatttatgggctatataagatgttttgatacaggcatgtaatgtgaaacaagcacatcaacaagaatggggtatccatcccctaaaacatttgtcctttgggctacatgtcatttcctaatgtaaagaaaatggacagacagaaccaacattgatttgactgggtgaaaaagtccatttgagttgggagcaggggttgtgttcctggatttgggttgttaggacagtgtaaaaaggcttcacaggggaacattcttttctgataaaggaaagcag

SEQ ID NO: 539 - DNA, 468 bp, Homo sapiens
  misc_feature 5, 35, 36, 59, 251, 367, 436, 437: n = A,T,C or G
tttcnataaactttatttttagagcagttttaagnnggtagcaaaattgattagaaggnacagagatgtcccatacacctcctactcccacacatgcacagccttccccattatcaatagcccccaacagagggatacatttgttaacaactgacgaacctacatatcattatcacccaaagtccacagtttatattattccttctggagaattttcaaatacagaaattcctctaccaggaataaactancaatttcctctcggctttctataaatttaattattatttcagaaattagcctatctttacaggagaaaatgttataaaccatgaaaagactatcaaatacacaaggaagtgaatgntatataaaaaatgtaccatctcctaaacaactacctgcattcccttcttgttggtaagttataatttgnnatagttctgatcatctgtttaattaatttgc

SEQ ID NO: 540 - DNA, 397 bp, Homo sapiens
  misc_feature 35, 360: n = A,T,C or G
ctgttttattaattcccccatttgcagcacacttntctcttccaacattcatcagtcagatcagagtccacggtcttttcaaaatttagataaactggcttacattttgtaatgatgtccccagacaacaccccactccaacccattctgtttgttactattagtttacaacatgcatgtgcctttactttcattttcatagtatttaaaaatggaagggcactcccaaatttactttaacccctttaataatctctctcctcctgctctctctggtcctccagacaactgttgatttactttcctttatgatggattagtttgcattttctagaattttatatgactgacatataaagnttttatgtttctcccctttgggtttcttcatgtggca

SEQ ID NO: 541 - DNA, 248 bp, Homo sapiens
cctagataggggattgtgcggtgtgtgatgctagggtagaatccgagtatgttggagaaataaaatgtgcatagtgggggttttattttaagtttgttggttaggtagttgaggtctagggctgttagaagtcctaggaaagtgacagcgagggctgtgagttttaggtggagggggattgttgtttggaagggggatgcgggggaaatgttgttagcaatgagaaatcctgcgaataggcttccggc

SEQ ID NO: 542 - DNA, 366 bp, Homo sapiens
  misc_feature 75, 123, 364: n = A,T,C or G
aatcggccctctagatgcatgctcgagcggccgccagtgtgatggatatctgcagaattcgcccttgagcgatancgcgggcaggtccaattgatttgatggtaagggagggatcgttgaccncgtctgttatgtaaaggatgcgtagggatgggagggcgatgaggactaggatgatggcgggcaggatagttcagacggtttctatttcctgagcgtctgagatgttagtattagttagttttgttgtgagtgttaggaaaagggcatacaggactaggaagcagataaggaaaatgactatgagggcgtgatcatgaaaggtgataagctcttctatgataggggaagtagcgtcttgtanac

SEQ ID NO: 543 - DNA, 460 bp, Homo sapiens
cctactatgggtgttaaattttttactctctctacaaggttttttcctagtgtccaaagagctgttcctctttggactaacagttaaatttacaaggggatttagagggttctgtgggcaaatttaaagttgaactaagattctatcttgggcaaccagctatcaccaggctcggtaggtttgtcgcctctacctataaatcttcccactattttgctacatagacgggtgtgctcttttagctgttcttaggtagctcgtctggtttcgggggtcttagctttggctctccttgcaaagttatttctagttaattcattatgcagaaggtataggggttagtccttgctatattatgcttggttataatttttcatctttcccttgcggtactatatctattgcgccaggtttcaatttctatcgcctatactttatttgggtaaatggtttggctaag

SEQ ID NO: 544 - DNA, 116 bp, Homo sapiens
  misc_feature 42, 46, 95: n = A,T,C or G
ccgccagtgtgatggatatctgcagaattcgccctttggagngctngcgcccgggcaggtctgtttcagcagctcctccttcttcttcccgcgangatctcgagccttgatcttgg

SEQ ID NO: 545 - DNA, 380 bp, Homo sapiens
  misc_feature 13, 18, 102, 104, 123: n = A,T,C or G
cgacggatcgatnagctngatatcgaattcggacgagcatggcgtattgctgcagatatggattcttcagaatgctccatgacaaatgtactgacgggaagncnatctaaaggaggcattgtnatgagagaaaggtctcgagctccagataaagagagatacagagttcttggaattggagttgcagaaacagtaagacaatcgattgtggggaagcgttcttttagagaatctttggccttcactccaaagcgttgttcttcatcaataataagtagctcgtgccgaattcctgcagcccgggggatccactagttctagagcggccgccaccgcggaggagctccagcttttgttccctttagtgagggttaatttcg

SEQ ID NO: 546 - DNA, 418 bp, Homo sapiens
ccagggcaattaggcaggagaaggaaataaagggtattcaattaggaaaagaggaagtcaaattgtccctgtttgcggatgacatgattgtatatctagaaaaccccattgtctcagcccaaaatctccttaagctgataagcaacttcagcaaagtttcaggatacaaaatcaatgtacaaaaatcacaagcattcttatacaccaataacagaccaacagagagccaaattatgagtgaactcccattcacaattgcttcagagaataaaatacctgggaatccaacttacaagggatgtgaaggacctcttcaaggagaactacaaaccactgctcaaggaaataaaagaggatacaaacaaatggaagaacattccatgctcatgggtaggaagaatcaatatcatgaaaatgg

SEQ ID NO: 547 - DNA, 172 bp, Homo sapiens
cctgaggttgggagaaattttgtccatttctttagaaccaaaattggcaaccagagagtatttggatgttacacaaaatatctagtttccctttctagcctaaattgggttgtttatagcacccgtctctccatttgagaaaaatggttaggatgctggtgcagggatgagg

SEQ ID NO: 548 - DNA, 367 bp, Homo sapiens
  misc_feature 340: n = A,T,C or G
ggtctgacttaagagaaacaatggaaggcaagaggcagtagaataatatattcaaaagatgcaaaggaaaaaaacctctcagccacgaattccttatccagcaattatttttcaaaaatgaaaataacacaaagacttagccagataaacagaaacattaactgaagttgttgctggcagacctaccatataaaaataaaaaactctaaaaaaattcctatggctaaaagcaagttacagaagacagtcacttgaatccacattttaaaaaaagcactgatatacgtaatattgacattataaaagacagtaaaaatgcatttcttctttataataaatngcttattaaataacatgtgtataatgg

SEQ ID NO: 549 - DNA, 418 bp, Homo sapiens
ccaaatcagaacctagagtgagcattctataaactcacctttgctttgatccttgaagatcacaagttttgatactgttgaaatctctactctttcaacactttaattaaatggcatttagaatttcatatacttctgttgttgtttccacaatcttaaactggatttagaaatacttataatgtaaatgcaagagctttaacttagtaaccgtatttcctattttttgttgtttttcttttgccagaatttctgtttgtctacaataaagtccagcgaaatacagtatttggttaggttacttgttaacataaaattttatcatttgtagagtttttacttaaccttcctattctctagtctctataatctttcaatgaagataaccagttacgaatatctcctataccatattagg

SEQ ID NO: 550 - DNA, 234 bp, Homo sapiens
  misc_feature 15: n = A,T,C or G
cctacccgccgcagnactgatcattctatttccccctctattgatccccacctccaaatatctcatcaacaaccgactaattaccacccaacactcacaacaaaactaactaatactaacatctcagacgctcaggaaatagaaaccgtctgaactatcctgcccgccatcatcctagtcctcatcgccctcccatccctacgcatcctttacataacagacgaggtcaacgat

SEQ ID NO: 551 - DNA, 542 bp, Homo sapiens
  misc_feature 13, 14, 29, 160, 190: n = A,T,C or G
cacccctaccccnntcctcataaaagttnctctccctggatcctctttttccctcatgagtgcccggttgcccaagtcaaaaacctgggagtgatataaactccccacacatccagtcagtcactcatcaactctattgattctgtctgctaaatatatntcaattgtattaacttaaacatatgcatanggcactttcttcttcactgcatttttgtgggctgcacttacctttcaggtaacgacaacactggcccctcttgcccttctagtcagaagtgccaaaatgatgagagctagccatgacaaacccacagccaacattacactgaatgtgcaaaactggaagggcatccaaacagaggaggggagagaggaatagacaggaagtcaaactgtctctgtttacagatgacatgtttctatatctataaagccccatagtcttggccccaaagcttcttctgctgataaactttagcaaagtcttagcatacaaaatcaatgtgcaaaaattactaacagtcctatacatcaagtca

SEQ ID NO: 552 - DNA, 411 bp, Homo sapiens
  misc_feature 6, 25, 209: n = A,T,C or G
cctggntgacaaggaggtgcctgtnatgtgaagatttgaggaaagagcattccaggcagggggaaggcttgatgcaaagggtctactgcaggcattagctgagcttatttaaagatcagaatgaaggccattgtggctagaacagagtggacaggaaggaatggtaccaggcaaagctgaagaagttggcaggattgagctctcataantcatggcaaagagttcccatttcattgtttgacggaaataaattggaaggtcttaagtaggagaagatttgattagatttacattttacgaagaagcactctggatgttatgtgaagaaatggcctttgcagggcaagggtggaaacaaagagatcagttaggaaattattggagtagctgaggattggatgaggggatgtg

SEQ ID NO: 553 - DNA, 631 bp, Homo sapiens
  misc_feature 395, 574: n = A,T,C or G
ccgggattagaactaaaacaagtgagatcacccctctaattatttctgaacttggttaataaaagtttataagatttttatgaagcagccactgtatgatattttaagcaaatatgttatttaaaatattgatccttcccttggaccaccttcatgttagttgggtattataaataagagatacaaccatgaatatattatgtttatacaaaatcaatctgaacacaattcataaagatttctcttttataccttcctcactggccccctccacctgcccatagtcaccaaattctgttttaaatcaatgacctaagatcaacaatgaagtattttataaatgtatttatgctgctagactgtgggtcaaatgtttccattttcaaattatttanaattcttatgagtttaaaatttgtaaatttctaaatccaatcatgtaaaatgaaactgttgctccattggagtagtctcccacctaaatatcaagatggctatatgctaaaaagagaaaatatggtcaagtctaaaatggctaattgtcctatgatgctattatcatagactaacgacntttatcttcaaaacaccaaattgtctttagaaaaattaatgtgattacaggtagagg

SEQ ID NO: 554 - DNA, 558 bp, Homo sapiens
  misc_feature 6: n = A,T,C or G
ccaggntagtctccaactcctgaccttagctgatccacccacctcggcctcccaaagtgctgggattacaggcatgagccactgcgcccggccaaacttgatatgcatttttaaataagttaatacattattcatggtttagtctcattatatattctatggtccactttgaaatttcatctaaccaaaatcatcttcatcctgcaatttgaggtttggacacaatggggattgatcagtaatttcttcatatgccctttctcaaggaaatagtttcctatgaaaaaaaagtcctatgttttcatgtaagttctctttttggagaagaaaaggagacattcttacttagcactctcagttttacaaaacgctgccaaccttaaaatttgtctattgattcccaaggcacacaaccaatagtctgtcaataacccggaataacatttctttaaggccccagtaactttcacatgtttgggttccaatcctcacctagaatcttgttaagaaaagtaaaccattcactcctctagaaactctaaggttgcttcttagggg

SEQ ID NO: 555 - DNA, 212 bp, Homo sapiens
ccaggtatttgcataatggcttttcttctgttgcctttgttcctttgtggccccagctaattgcctgagagtgccactgttagttttcaactctttctgatagaaaccctgtgtactaacatggaaatcttaggtaatctgctttttcaaagcacaatgcagaatttattggcggtggtgtaactttaagaatatccgagaagccaccaagg

SEQ ID NO: 556 - DNA, 219 bp, Homo sapiens
  misc_feature 214, 216: n = A,T,C or G
ccatgtgtctatctggagagaaggggaaacagcaagtgcaaaggccctgagatggaacatatctggagaattcgaagaatggtaagaaggccagagtggagcagaacaagtgtgggagagagttgtaggagatgagatcaaaggctaggaatgaagtgtaaggccatgtcatgtgaccttgtatgtccttgtaaggcttttttttttttttttnancct

SEQ ID NO: 557 - DNA, 482 bp, Homo sapiens
cctactatgggtgttaaattttttactctctctacaaggttttttcctagtgtccaaagagctgttcctctttggactaacagttaaatttacaaggggatttagagggttctgtgggcaaatttaaagttgaactaagattctatcttggacaaccagctatcaccaggctcggtaggtttgtcgcctctacctataaatcttcccactattttgctacatagacgggtgtgctcttttagctgttcttaggtagctcgtctggtttcgggggtcttagctttggctctccttgcaaagttatttctagttaattcattatgcagaaggtataggggttagtccttgctatattatgcttggttataatttttcatctttcccttgcggtactatatctattgcgccaggtttcaatttccatcgcctatactttatttgggtaaatggtttggctaaggttgtctggtagtaaggtggag

SEQ ID NO: 558 - DNA, 679 bp, Homo sapiens
  misc_feature 5: n = A,T,C or G
ctgtnaaaattctgaacctatccccaaaagaaaaaccgtgaaatacaagttttaggaggtggagcaaagaaaagccaagttatttaaaaccaataaacacaagagacaattctgctggagaatttactttctccaaaacatcaaatggactttaaagcagaagaccacattttatgagaaagttatgtcactgaaaagcttcatgtaaagtgactttgtaaatggaatatttttaaatgataaaaagaaaataacttttccaggaatcctttggagaggctgataaccagatattaaattatcaattttgccaaagtggacttttaaaaaatgtgttacttttaaaaactaacttgaaagaatttatgaggcaatctatctgagtatgtttattgttgctccattggctttcaggattttggtcatttcactgttaactcttacatcagagaataaagaaaagaaaatgaaactttgttaggaactgggatggaaaatgtagtcccagacagatctactgacctcgactgagtttcagaaatatcccaggattttggttattcatgcctttcttttgtgactttctttcaaattagccaattaaagataccccttcaatcaccggtgacatcagtacaacagtttttcaacagttttctctctcctgaccaaacagttt

SEQ ID NO: 559 - DNA, 488 bp, Homo sapiens
  misc_feature 393, 407, 420, 450: n = A,T,C or G
ccccactgtactccagcctgggtgaccccatctcaaagaagaaaagttaccagatgtcatgggtaaaggttggtcttcaagtggcctcataagttgtcttgcatttaaattcagggaattcattggaccaataggttacattttcgttccttttttgttttggttcatctgttaagcagtgggggcctaattactgctcctttgtaaaaacacattttcccaaagaacactgaattaccgttcaaactggttgttgatgggtaacaagggctgtttttgctgccccaaaagggcttaacaatttaggcggatagtttacttaaaaaaaaaaatcctttggagacatactgaaaatgcaaactagtttctaaattatcaattccctacatgaanaagcagtttgccanagtttagtctcanaaaatgactggttggctctatttaaatcanaacccaatttctacgcacctgcccgcccggccaagggc

SEQ ID NO: 560 - DNA, 602 bp, Homo sapiens
  misc_feature 5, 566: n = A,T,C or G
cctanttaagaattccttgccttagtggtgaacaaggactaaacacagacaatgggtgaaacacagacgctaattcacataacagagagtaggcaaccttaagaatgaattgatgcagactcctatagaattcctctgttatgactgggttcttattttctcctccttgtatgtagttgaaatttcatcattatgaatagttccttggatctttttttaaagttgtgaatgcgagtgtttggctttgtaatacaactttttagtatccagaagataaccagtgctctaccaataaagatcttttgatacaaagggttttaacttctgccagttcttactcatttttttcaggttttttatacatttcttaaacaacacatacattatgtaaaatataagaattaatgtacattctcaaggccagattcagtgacaaaatgcactacccgaatctagtaacacatttactccttgctgcatataagtggcgtgtaagaaatacagggtatattgttttgtgatccatgcagtaaatgttcacaaatatcaggcaaacaactagacgntcttcagctactaaaattaactgtcccagtcacaaa

SEQ ID NO: 561 - DNA, 683 bp, Homo sapiens
gtctatttttaaaaagaaagaaaaaaaccacttttttatagtccctagctttgccatatgcccgccttaagtggaaggaaagttaatcacttaactatgttttataaaaagaaaaaagggcttggaatgctattactgttcacacaaagtatgattctgtttgaataaggcaaatgctcctttttttaaaaaaagacattactgtaatatcaaaaaccgtggcagtttgtatacaactctgggcttgattttttttaaaaaaacagaatgaattgatgtcttattttataaatgttctatatttattaggagaaaactttatattgccttttttatcaatcatgtaacaggcttatagctttccaacagagctgcttgccaaacaattttttttgtttattaaacagtgctgaaacaaacaggatcagcatttacttaagatgttaagaatgaggacttttaatcagccgaaccaagatattgttacctgtatgcattcccaaagtctagatgctcagtatgttcagtcatatctttcagaatcagtgaaccgattaccctttttttggtattcactctacatctgccaacctagttcaccttggttttgtgtctgctgtagaagggaaccataacttggttaaaccgtagggattatcattgtatacatgctgtgaacatgt

SEQ ID NO: 562 - DNA, 420 bp, Homo sapiens
gcactttttttccagtaaggattcatctcttgctctcctatatggtcattatattttatattttacatatttataaacatgacatatgtatttatgttccacaaagggctttgaatagaatttacacatagagttccctgggttgatgtgtttatcaaaatggaagataaagtgaattaattacttaaatatttaacactattgaatagaaataatttccccaatattgcttcatgatttagacagtctattaaatgtttaagcaaggcactagactaagtttattaagacaaattttggaatatgtgcagaaatatgacctggctaatagtacagagtcaaagctggttgaatggtgttatatagtggattcagattgatgtggcagtggtggttacactaggggcactaaggttatcc

SEQ ID NO: 563 - DNA, 482 bp, Homo sapiens
ctccaccttactaccagacaaccttagccaaaccatttacccaaataaagtataggcgatagaaattgaaacctggcgcaatagatatagtaccgcaagggaaagatgaaaaattataaccaagcataatatagcaaggactaacccctataccttctgcataatgaattaactagaaataactttgcaaggagagccaaagctaagacccccgaaaccagacgagctacctaagaacagctaaaagagcacacccgtctatgtagcaaaatagtgggaagatttataggtagaggcgacaaacctaccgggcctggtgatagctggttgtccaagatagaatcttagttcaactttaactttgcccacagaaccctctaaatccccttgtaaatttaactgttagtccaaagaggaacagctctttggacactaggaaaaaaccttgtagagagagtaaaaaatttaacacccatagtagg

SEQ ID NO: 564 - DNA, 302 bp, Homo sapiens
ctggaagtgaaggtactaatatacaaatggctcttgtttctgaatatgtgatataatttgtgaatctttggaaactgaattttttctatggagtgcaaatatagaagggttattttacaatgtttgttgtgaaaagaattcactttgtaaacaactattaaggctggaagtttagtgaaggtgcatagttttgaaagctacacaggtgaaaaatcaaacttattgtttgtaattttgctgttacatgttaagttactttgacagcaattttctaatgataatgtgatttatgatttaaaagg

SEQ ID NO: 565 - DNA, 554 bp, Homo sapiens
  misc_feature 4, 5, 37, 38, 550, 551: n = A,T,C or G
ccanngtgacatcatggcaatacagcaagaattctgnnatttatttagaagcctcaaggagaaggatcctggagcccctgaatgagagtttcttctccatgcctctccccagtcaaaatacatggaaatattcatagaagcattgtacccagcatgataaggaaggatggagaatggttccttatatctctgttcacaagacatcaacactcttaagtaactgtatgaaataaattctctgctgaaagcaaataaaccatctgaaaggtcttctggttacttacacagatttcctagagaatctgaaatcagcctaacagggaagattaatttttaaatgaatccaagttaatgaaagcaaagaactcttatacagaaatacattttcctattataaagcaggactaccttccctaatttctgatagacctaggacaatttgaatgggcattgaaattcttttggttgaattacgcaaacaagcaaaggaaaagtctcaattattattggaaaatttggggagagattattatctcttgatctcctagtnnatt

SEQ ID NO: 566 - DNA, 631 bp, Homo sapiens
  misc_feature 1, 14, 15, 35: n = A,T,C or G
ncgaagctgtgaanncattcacacggaatctgganggtattactgtaacttcttataatacataatataaaagtttttgaaagatatagacacaattaacccctaaacaacacactatctgattctcaaaagcaatggctatttaacaagatgtaaaaggacaataacatatcaaagaactttcacacacctaaagatagcatttagcagcaagttagtcagacaaaacaaacataaatatcttcacatttcctatgtttgtttttaactttacttcataaagccactgataattgaggtttctttcaagtataagatttctaaaattaaaaactgtttttgacatatttttataaagaaataaaaagcaaaacgcaatccaactatttatatgagtccctcttctccaacagctttagatgtttttctgagtactttttacacagaatatttttattaaaatcagttctaattcatttatgcagattaggggaaaatgattcataataaattaactttaaaattaccttctatctgcttctacctctatccccccatcaccaccaaatctgttgctacagtgaactgtagccaatgtctgtttgagggggcccaaagcatctggtaatct

SEQ ID NO: 567 - DNA, 510 bp, Homo sapiens
  misc_feature 6, 39, 87, 97, 111, 113, 161, 163, 179, 210: n = A,T,C or G
cctatnatagcttctctagctatcatactccaatcagcnaaaaatgagaaaatgttgagaaatagaagataattcctcatttaaggncaccttctanaatttgtgcttaanantctgttttcttctcatgggccagcacttcggcaactgggaaaaattangngtacagggatctaggnaatactgtttatttgagcaataatatattgngctaacgttcaggcatcctattactgagaaataagggaaaatgagtgtaaagtacaactaagagtctcggctacagggaaaaataccatcagttaaatatccatagtcctagagcatttatgtaaaactgcaatttgaatcctgcaatacattttggctttttcctcagtgataccatgtgtgggaagttgttctgtcaaggtgggtcggataatttgccctggaaaggacggatagtgactttcctgacatgtaaaacatttgatcctgaagacacaagtcaagaaataggcatggtgg

SEQ ID NO: 568 - DNA, 180 bp, Homo sapiens
  misc_feature 6, 11, 34: n = A,T,C or G
ttaatntgacncacgcttatgcggaggagaatgntttcatgttacttatactaacattagttcttctatagggtgatagattggtccaattgggtgtgaggagttcagttatatgtttgggattttttaggtagtgggtgttgagcttgaacgctttcttaattggtggctgcttttagg

SEQ ID NO: 569 - DNA, 237 bp, Homo sapiens
ccaattgatttgatggtaagggagggatcgttgacctcgtctgttatgtaaaggatgcgtagggatgggagggcgatgaggactaggatgatggcgggcaggatagttcagacggtttctatttcctgagcgtctgagatgttagtattagttagttttgttgtgagtgtcaggaaaagggcatacaggactaggaagcagataaggaaaatgactatgagggcgtgatcatgaaag

SEQ ID NO: 570 - DNA, 352 bp, Homo sapiens
ctgtctctccatttagagccccagttggtcctgacctcttacaaatttggtgttttcactttgatgtttatgaaccgattgcattaaaaatgcaggataatgattcagggttagagaaactattatttatacaaatgtggttaacacctcatcattttaaattggctgtgctaataatgctcattgtgctcttcagggttatgtgtgtgtgtgtgtgtgtgttttgcctgaatctgcaacctacatttgctctggcagtatgttgagtatatgctagaatagaatggacctaggcaactctaaggtcctacaactaaatacacttacttaggaaacctcctaaataagtagg

SEQ ID NO: 571 - DNA, 402 bp, Homo sapiens
ctgattttaacaataactactgtgttcctggcaatagtgtgttctgattagaaatgaccaatattatactaagaaaagatacgactttattttctggtagatagaaataaatagctatatccatgtactgtagtttttcttcaacatcaatgttcattgtaatgttactgatcatgcattgttgaggtggtctgaatgttctgacattaacagttttccatgaaaacgttttattgtgtttttaatttatttattaagatggattctcagatatttatatttttattttatttgtttctaccttgaggtcttttgacatgtggaaagtgaatttgaatgaaaaatttaagcattgtttgcttattgttccaagacattgtcaataaaagcatttaagttgaa

SEQ ID NO: 572 - DNA, 70 bp, Homo sapiens
  misc_feature 57: n = A,T,C or G
tggatccgagctcggtaccaagcttggcgtaatcatggtcatagctgtttcctgtgntcgttttacaacg

SEQ ID NO: 573 - DNA, 423 bp, Homo sapiens
ccaatggtttcttagtgaaagagtacactagctctgaatgcaatgccctcagaaagatatcattcatagagacatacaaagcacatggcaacatgacattggaatacacgattctgagcatcttcattcatgaccaacctggctatagatttcagatgtcctcttggctcgaaggatatctgggatatccatgctcacttgcattcctttccctttaatttcattttctaagtccttcttgtattgtttctaaaagaacagaaaataatcttggagctttgcttaagctttaatagcgatgttgaaatttacatgtttgaatctcaaagccacccatgtggaaagaaaacttatgctctttccagctatgattcacggcatttattttaaactttgtatcttgctgctgtcttacctggctgg

SEQ ID NO: 574 - DNA, 129 bp, Homo sapiens
ctgttaaaagaacaaacttagcaatatataacagtttgctaacaggatttttgactattcactttgcgagttatttttaaaaatccacttttttactgagtcttactacataccaggcactgtacttgg

SEQ ID NO: 575 - DNA, 684 bp, Homo sapiens
  misc_feature 7, 40: n = A,T,C or G
ccagatntgacttttcaaaactactcacattgtgaaaaangcaggaacaaatctagtttcaagttcagcatgccgttccctgtttaattcataaaacacaactggcagaagtattacttgaagcaaaacaaaagtaacgtgggaacttgcttatttgctaagccacaatgtatttttccaggaatagcataaatttgccatctttcttgtgtctatggaaaaggggtttagaattgtttcactaaaaattaaatttctatattgtcaaacatgattgtatactcaaattttaaaatgtgaagggaacacttactaagcatttcctgggtatgccactatattaagtcctagtaatatgatatagtttatttcaattttttttcaactcatacttcctttaaaatagcactgaccaaaagaaagttaacatgagcttcatgtacaatttttaatctttttgcagaaaaataaactgagaaaggctaaaattgttttatttaagccactataccaagacatattgatttcaccaatataaaaattgagatagtttacattttttggtacatctttaaaatctggtatgtatttttatactgacagcacatctcaatttggacaagctacatttccagggctcaatagtcaccatgaatctcaattgtaatcaaagaggttggcctg

SEQ ID NO: 576 - DNA, 134 bp, Homo sapiens
ccttatttctcttgtcctttcgtacagggaggaatttgaagtagatagaaaccgacctggattactccggtctgaactcagatcacgtaggactttaatcgttgaacaaacgaacctttaatagcggctgcacc

SEQ ID NO: 577 - DNA, 133 bp, Homo sapiens
  misc_feature 14, 25, 27, 34, 117: n = A,T,C or G
ctgtctctccattnagaagccccantnggtcctnacctcttacaaatttggtgttttcactttgatgtttatgaaccgattgcattaaaaatgcaggataatgattcagggttaganaaactattatttatac

SEQ ID NO: 578 - DNA, 200 bp, Homo sapiens
cctcaaatctatcttcaaaggtgacccagcaatcagtgtcaatgcctttactgtagttaacctggtaatttcattctttagtctctccaagaaaatctgaagtgtattaggcaagtcagaacccaaattgtctccaaggttgcaaataatttgtcccatacaggaaatagccctttccttgacttcctgatcaatgtcag

SEQ ID NO: 579 - DNA, 402 bp, Homo sapiens; identical to SEQ ID NO: 571

SEQ ID NO: 580 - DNA, 245 bp, Homo sapiens
  misc_feature 80, 114, 217, 233, 237: n = A,T,C or G
ccaattgatttgatggtaagggagggatcgttgacctcgtctgttatgtaaaggatgcgtagggatgggagggcgatgangactaagatgatggcgggcaggatagttcagacngtttctatttcctgagcgtctgagatgttagtattagttagttttgttgtgagtgttaggaaaagggcatacaggactaggaagcagataaagaaaatgactnttagggcgtgatcatnaaangggataaa

SEQ ID NO: 581 - DNA, 294 bp, Homo sapiens
tgcagcgcaagtaggtctacaagacgctacttcccctatcatagaagagcttatcacctttcatgatcacgccctcatagtcattttccttatctgcttcctagtcctgtatgcccttttcctaacactcacaacaaaactaactaatactaacatctcagacgctcaggaaatagaaaccgtctgaactatcctgcccgccatcatcctagtcctcatcgccctcccatccctacgcatcctttacataacagacgaggtcaacgatccctcccttaccatcaaatcaattgg

SEQ ID NO: 582 - DNA, 230 bp, Homo sapiens
gaggtcgccctcatagtcattttccttatctgcttcctagtcctgtatgcccttttcctaacactcacaacaaaactaactaatactaacatctcagacgctcaggaaatagaaaccgtctgaactatcctgcccgccatcatcctagtcctcatcgccctcccatccctacgcatcctttacataacagacgaggtcaacgatccctcccttaccatcaaatcaattgg

SEQ ID NO: 583 - DNA, 481 bp, Homo sapiens
ccaagggtgttctgcctgcctcagcctcccaaagtgctgggattacaggtgtgagccactgtgcctgaccacaggaaaacttatttaaatgagagatttgactcgaaagatcccgtttttttaaggctcttagttcttaaaagcggcacataatagaattagtataatcccaaataaattttcagtagatttttggtgtaacttgagaagatgattctgtcatttttagtgacaatttaaaagacctgaaattgtctacagccatagaaagtgaactactgatagttgtttctgtaaagttttattggaacacaaccacacctatttgttcatctgtattgtctttggttactttgtgcagagaccatggcccacaaacctaaaacattcactttctagctctttaagaaataattggcccactgacaccctggtcttaaggtctagaccaattatttctcaagagtattagctgaatcag

SEQ ID NO: 584 - DNA, 306 bp, Homo sapiens
ccaattaagagctaaatttacaaaataatctctatcaggaggctttaaggtttaatgtctctaaagtccctatggatataagaggcttgaatgtactgaattcaaatttggtttttaaatgttataatagtttaggcccgagagccacatatttctgtctaagaatagaaagcatagctagctgcccacacagaatattcatatagaggtggggggcaagaacaaaatttattcatttgatacatagaaatgggactacttagaatagactcataatagaaagcatcatctggtttctcatctcag

SEQ ID NO: 585 - DNA, 308 bp, Homo sapiens
ccagaatggtacagagtggagggtgttctgctaatgacttcagagaagtatttaagaaaaacatagaaaaacgtgtgcggagtttgccagaaatagatggcttgagcaaagagacggtgttgagctcatggatagccaaatatgatgccatttacagaggtgaagaggacttgtgcaaacagccaaatagaatggccctaagtgcagtgtctgaacttattctgagcaaggaacaactctatgaaatgtttcagcagattctgggtattaaaaaactagaacaccagctcctttataatgcatgtcag

SEQ ID NO: 586 - DNA, 416 bp, Homo sapiens
  misc_feature 105, 119, 132, 139, 140, 144, 159, 160, 208, 226, 230, 247,250: n = A,T,C or G
cctgtctttgaatggatgaaataggttaataaaaaacatcactgtttaaaaactagaacactgaaaaattctaggaaagcttattttcccttatatttttatggnactttcaacacttnacaacactatttnaattaanntttnttctagagtttatannatatcagtacattcttttctgtggatgcaataatatagaatcttattncaaatcttactggcaggntctnttaaattcttcaacggntgncatagtgattaaccaaaattagttatgatttctgcctatctgtgtgagaacttacaggggaaattgttctaaacctgaggaacatgaagtaactgtactgcacactccaaatgatgacagtcattttatatcaccttcaattacccaacagcttttaatagtctgg

SEQ ID NO: 587 - DNA, 382 bp, Homo sapiens
cctactatgggtgttaaattttttactctctctacaaggttttttcctagtgtccaaagagctgttcctctttggactaacagttaaatttacaaggggatttagagggttctgtgggcaaatttaaagttgaactaagattctatcttggacaaccagctatcaccaggctcggtaggtttgtcgcctctacctataaatcttcccactattttgctacatagacgggtgtgctcttttagctgttcttaggtagctcgtctggtttcgggggtcttagctttggctctccttgcaaagttatttctagttaattcattatgcagaaggtataggggttagtccttgctatattatgcttggttataatttttcatctttc

SEQ ID NO: 588 - DNA, 307 bp, Homo sapiens
cctactcttctccgtccattgtactatctgcccgtggtggggatggcagtaggatcatatttgatgacttccgagaagcatattattggcttcgtcataatactccagaggatgcgaaggtcatgtcctggtgggattatggctatcagattacagctatggcaaaccgaacaattttagtggacaataacacatggactaatacccatatttctcgagtagggcaggcaatggcgtccacagaggaaaaagcctatgagatcatgagggagctcgatgtcagctatgtgctggtcatttttggagg

SEQ ID NO: 589 - DNA, 89 bp, Homo sapiens
cctgggtgattgaggatgcaatgagctgtgattgtgccaccacactccagcctgggcaatacagcaagactgtctcaaaaaaaaaaaaa

SEQ ID NO: 590 - DNA, 456 bp, Homo sapiens
cctcagttcttgattgtggttgacggggcgtcaccatgaaggagcccatttagtataaagcttccaaccttttctcttaatcgtttctttaatcttttaaaccatcttcaagtgcataggggagtttccgatgccagaggatgaaagcaagtgctctctccaccctctcctcccagagtgaaaacaaatccttttgctgatacttgtttcaaaagcatccattgtaaagcttctcagtgacacaaaatactgagaggtaactttttatcaatcaaaccacataccccaatttaacacctttcaatgctctgaattcaactgacagactaaagggtgtttcctgtaacagtctgaaatattaagtgttttttttgttttgtttttaaatcttatttcagaaaacttcctcttggggtaggaaagtacacatgaagcagcaaagtaacgaagaaaaac

SEQ ID NO: 591 - DNA, 289 bp, Homo sapiens
ccaattgatttgatggtaagggagggatcgttgacctcgtctgttatgtaaaggatgcgtagggatgggagggcgatgaggactaggatgatggcgggcaggatagttcagacggtttctatttcctgagcgtctgagatgttagtattagttagttttgttgtgagtgttaggaaaagggcatacaggactaggaagcagataaggaaaatgactatgagggcgtgatcatgaaaggtgataagctcttctatgataggggaagtagcgtcttgtagacctacttgcg

SEQ ID NO: 592 - DNA, 435 bp, Homo sapiens
  misc_feature 250, 316, 325, 392, 430: n = A,T,C or G
cgcgttagatgcgccttttccggcctgtgcgtctgctctggttcctctcaggcagcaaagctggggaaggaagctcaggcaggagcctccccgacaccacagcggcacaagcagcagctaaagcaccgcactttgctctgctaaccttttacttaaatgaggttttgccaaatccacatctggaaccgcatcacacccatttgcaaggatgtttgttctttgatgaaactgcatctctactgcacatganggctttcattgtaggacaagaggagagttcgtttatttttgtaactgttttacatgttccgattanttaatcggnagcttatgtcatttgctatgcctgttgtcttctaatctctccttactaaaacattacttcaaatttnaattgacccttgtttataatttatttaacgggatttgngtgtc

SEQ ID NO: 593 - DNA, 633 bp, Homo sapiens
  misc_feature 35, 620: n = A,T,C or G
ctgtttagtcagataattgtgtccgaattgattangaaaataatagaccagccataaagcagcataaaatattatgaaactattccagaagttcagtaatatctttgggacctgctcatagcccaagttttgtgaatacttttgtagttaaaaaaaatttttactttaccagggcattgcaattcttttccatcagtgaatttcattctacagacttttcagagcatctcataatcagtcaacaaatctatttcaaatgtgtttgttactaagcaacggttgctaagagcttctgtaattaagatgaaagttccaaggtaacaatgcccaaacacagcaccattttcaccattttctgataatgcaggagtaggatggctaaaagtgaaagaagaatctactctatggaaagcatggcacctgaaatttctgaagatattggctgtcctctagcttatatgagagagagtgtttgtgctttactaatcaaccagtcatttttttcttgtgtggctgaaatgtacattccagacatgaacaggtagagtatgtgttgggggcaggtttatactgcatgggtgtgctgagacagggccacgtggtgatgtaaatgatgctgnctgacacgtgcag

SEQ ID NO: 594 - DNA, 501 bp, Homo sapiens
  misc_feature 34: n = A,T,C or G
cctttacaagatgctggtaccttgatcttggacngggcaggctccaagatggaaagaaagtgagcatctgctttttagggattatccagtctatactactctgttctagccacacaaaacaggttaagacagaaattggtaccaagagtggggtgttactacagcaaatacctgaaaatgtagaagaggctttgaaatgtggtaattggaagaagctggtagaatttggaggagtaggctagaaaatgtctgtattttcatgaatggagcattaagaataattccggtgaggccatagggaaagtctaaaacttttcagaaattatgtaagcgattgtgattagtaggttggtagaaatatagacagtaaaagcaattctgatgtggtttcagaggaaaatgaaaaatattagaaactgaaggaaggggcatccttgctataaactggcaaagaacttggctgaaatgtctccatgtccaagagatttatggcagaaatgt

SEQ ID NO: 595 - DNA, 383 bp, Homo sapiens
ctggtcaccatcatccctttaatcaactcacacctgtttaaagagtgtttctgatttgaccttcatcccttagtttactggcgttaaaaaaagtctcagcaattttcattatttctcgtgggtctcattatcaaacctttacttatttcggcatatttcctctgggcttcttctagtttctgccttacaagcaatgctgttctgtaaatttattgaaacctctggaacatttcacctttagagatggaggatggaaggattggtaccagaagagggctaagatacgttttctgtcttgagctgaaagcacagtctactctccttcgttttgtcgatgagaaagttgaggccagaggggaggtgacatgtttagagtcacccag

SEQ ID NO: 596 - DNA, 266 bp, Homo sapiens
ccatggctaggtttatagatagttgggtggttggggtaaatgagtgaggcaggagtccgaggaggttagttgtggcaataaaaatgattaaggatactagtataagagatcaggttcgtcctttagtgttgtgtatggctatcatttgttttgaggttagtttgattagtcattgttgggtggtaattagtcggttgttgatgagatatttggaggtggggatcaatagagggggaaatagaatgatcagtactgcggcgggtagg

SEQ ID NO: 597 - DNA, 383 bp, Homo sapiens
  misc_feature 35: n = A,T,C or G
ctggtcaccatcatccctttaatcaactcacaccngtttaaagagtgtttctgatttgaccttcatcccttagtttactggcgttaaaaaaagtctcagcaattttcattatttctcgtgggtctcattatcaaacctttacttatttcggcatatttcctctgggcttcttctagtttctgccttacaagcaatgctgttctgtaaatttattgaaacctctggaacatttcacctttagagatggaggatggaaggattggtaccagaagagggctaagatacgttttctgtcttgagctgaaagcacagtctactctccttcgttttgtcgatgagaaagttgaggccagaggggaggtgacatgtttagagtcacccag

SEQ ID NO: 598 - DNA, 266 bp, Homo sapiens
ccatggctaggtttatagatagttgggtggttggtgtaaatgagtgaggcaggagtccgaggaggttagttgtggcaataaaaatgattaaggatactagtataagagatcaggttcgtcctttagtgttgtgtatggctatcatttgttttgaggttagtttgattagtcattgttgggtggtaattagtcggttgttgatgagatatttggaggtggggatcaatagagggggaaatagaatgatcagtactgcggcgggtagg

SEQ ID NO: 599 - DNA, 294 bp, Homo sapiens
  misc_feature 201: n = A,T,C or G
ccaattgatttgatggtaagggagggatcgttgaccacgtctgttatgtaaaggatgcgtagggatgggagggcgatgaggactaggatgatggcgggcaggatagttcagacggtttctatttcctgagcgtctgagatgttagtattagttagttttgttgtgagtgttaggaaaagggcatacaggactaggaagcanataaggaaaatgactatgagggcgtgatcatgaaaggtgataagctcttctatgataggggaagtagcgtcttgtagacctacttgcgctgca

SEQ ID NO: 600 - DNA, 213 bp, Homo sapiens
agatattgggctgttaattgtcagttcagtgttttaatctgacgcaggcttatgcggaggagaatgttttcatgttacttatactaacattagttcttctatagggtgatagattggtccaattgggtgtgaggagttcagttatatgtttgggattttttaggtagtgggtgttgagcttgaacgctttcttaattggtggctgcctttagg

SEQ ID NO: 601 - DNA, 471 bp, Homo sapiens
  misc_feature 1: n = A,T,C or G
ncctactatgggtgttaaattttttactctctctacaaggttttttcctagtgtccaaagagctgttcctctttggactaacagttaaatttacaaggggatttagagggttctgtgggcaaatttaaagttgaactaagattctatcttggacaaccagctatcaccaggctcggtaggtttgtcgcctctacctataaatcttcccactattttgctacatagacgggtgtgctcttttagctgttcttaggtagctcgtctggtttcgggggtcttagctttggctctccttgcaaagttatttctagttaattcattatgcagaaggtataggggttagtccttgctatattatgcttggttataatttttcatctttcccttgcggtactatatctattgcgccaggtttcaatttctatcgcctatactttatttgggtaaatggtttggctaaggttgtctggt

SEQ ID NO: 602 - DNA, 482 bp, Homo sapiens
  misc_feature 32: n = A,T,C or G
tgagcatacagcaataaaaataacataatttntatgtgtacaatatttatggaatacgttactggaacagataaataatttagttaataacatgacaaagaacagaaattgtatacactatacagcatagtaatagaataatgaatgattaaagttattaatattaggtagaaaatgaagggtatctttgagagcagaactcaaggaagcaagcaatttgccttatgaggaaagagttacctgtggataaaggagaaactgaaaaatttacaagtcaagactttttgagcaaaaacaaaaatatgactatgagtcaccaattcagtacagtgaaaaaaaagttgaagagatatcttggaagtaaaccatgttgtggaagagcagggttttgataatcatgggattattctgaatgaattttaaatgcgataggaatatatgagataatttcaccagagaataatatgatcatgtttgcattt

SEQ ID NO: 603 - DNA, 372 bp, Homo sapiens
gttccaaccttcatttctgaaactgttctagagcactttgtctttctcgtagttcataacttaccccttcagtctagaattagaattacattatctgttttactactttactagactgtaagctcctagaagataaggactagggagttcatctctgtattccaccagaaggtacagtgactcataactagagtctttagatgaaacttactgagttgaataacttaatatatttctgttttcattcccaagggaggccatgtctggagatagaccttgaatttaataaattttaggcactataccatttcagtggagaaaattgttgggaaatttggggggatggatatataagggggaggaagtcactgg

SEQ ID NO: 604 - DNA, 468 bp, Homo sapiens
  misc_feature 3, 37, 199, 412, 460: n = A,T,C or G
gcngttttgagtgagtttcttaatcctgagttctggnttgattgcactgtggtctgagagatagtttgttataatttctgttcttttacacttactgaggagagctttacttccaagtatgtggtcgattttggaataggtgtggtgtcgtgctgaaaagaatgtatattctgttgatttggggtggagagttctgtanatgtctattaggtccgcttggtgcagagttgagttcaattcctggatagccttgttaactttctgtctcgttgatctgtctaatgttgacagtggggtggtaaagtctcccattattattgtgtgggagtctaagtctctttgtaggtcactaaggacttgctttatgaatctgggtgctcctgcattgggtgcacatatatttaggacagcnagctcttcttgttgaattgatccctttaccattatgtaatggccttgnctcttttg

SEQ ID NO: 605 - DNA, 288 bp, Homo sapiens
ccaattgatttgatggtaagggagggatcgttgacctcgtctgttatgtaaaggatgcgtagggatgggagggcgatgaggactaggatgatggcgggcaggatagttcagacggtttctatttcctgagcgtctgagatgttagtattagttagttttgttgtgagtgttaggaaaagggcatacaggactaggaagcagataaggaaaatgactatgagggcgtgatcatgaaaggtgataagctcttctatgataggggaagtagcgtcttgtagacctacttgc

SEQ ID NO: 606 - DNA, 572 bp, Homo sapiens
  misc_feature 5, 399, 483, 488, 532: n = A,T,C or G
gaatnaaatgaatgaaatagaaaatataattgagagcttcaacaacagactataccaaatggaggaaaaaatttctgaacttgaagatagatcttttgaaataacacaagcagtggcaaaaatgaattaaaaagaataaggaaagcctaaaggatttatgagatatcattaagcaagcaaatattcatactatgggcattccagatggaaaaaagaagggtaaaggtgaggaaatcatatttaatgaaataatagcagaaaatttccggagtcttgggagagagatgagcatttaggtccagggagctcaaagaaccccaaacagattcaacccaaacaggtcctctctggagcccaacatagtcaaattgtaataagtaaaagacaaagaattccaanaagcattcaagagaaaagagtcaagtcataaataagggaatctccattaggctaacagcagatatctcagcagaaagcttacangccangagagaatgggatgatatattcaaagtacttgaaagcaggggtnggggaaaccctgctagctaaaaatattatacccttgcaaa

SEQ ID NO: 607 - DNA, 178 bp, Homo sapiens
  misc_feature 37: n = A,T,C or G
ctcggggtaatctcccagcaagaggtcaggtcctggntgtgcgtcccagggtgtcagtgaaattggctgctcccctgacccagggcaccttcatgcgtcttcacagcaggactactgtgaccaaggccagacctttcatctttcaaaagactttgactaaaaatgctttaaaaaagca

SEQ ID NO: 608 - DNA, 416 bp, Homo sapiens
cctgtctttgaatggatgaaataggttaataaagaacatcactgtttaaaaactagaacactgaaaaattctaggaaagcttattttcccttatatttttatggtactttcaacacttaataacactatttcaattaagttttctcctagagtttatagtatatcagtacattcctttctgtggatgcaataatatagaatcttattccaaatcttactggcaggttctcttaaattcttcaacggctgtcatagtgattaaccaaaattagttatgatttctgcctatctgtgtgagaacttacaggggaaattgttctaaacctgaggaacatgaagtaactgtactgcacactccaaatgatgacagtcattttatatcaccttcaattacccaacagcttttaatagtctgg

SEQ ID NO: 609 - DNA, 648 bp, Homo sapiens
ctgatctctcagcagaaactcttcaaaccagaagagagtgggggccaatattcaacattcttaaagaaaataattttcaacccagaatttcatatccagccaaactaaccttcacaagtgaaggagaaataaaatcctttacagacaagcaaatgctgagagattttatcaccaccaggcctaccctaaaagagttcctgaaggaagcactaaacatggaaaggaacaaccagtaccatcgaggctaggaagaaaccgcatcaactaaggagcaaaataaccagctaacatcataatgacaggatcagattcacacataacgatattaactttaaatgtaaatggactaaatgctccaattaaaagacacagactggcaaattggataaagagtcaagacccatcagggtgctgtattcaggaaacccatctcaccgtgcagagacacacataggctcaaaataaagggctggaggaagatctaccaagcaaatggaaaacaaaaaaaggcaggggttgcaatcctagtctctgataaaacagactttaaaccaacaaagatcagaagagacaaagaaggccattacataatggtaaagggatcaattcaacaagaagagctaactatcctaaatatatattgcaccc

SEQ ID NO: 610 - DNA, 310 bp, Homo sapiens
ccagctcttctctgtcacattcctatttctgacttctgcctggctttcagtttctgccccaccttggctttttcccagcttgaacctaatagaactccagagtttggggggaggcccagccctttgttttctgctcttgaagcatattcacacataaaaagttgtattctcttacacaaactgttttgaggctcttaccgtagtcgaaggtatcttagatcttccttagtgatctcattaagaatatccgaaagtgtataaccctcttcaacaatctgaaacaaagatcagatccttaagagctgagcag

SEQ ID NO: 611 - DNA, 254 bp, Homo sapiens
  misc_feature 39: n = A,T,C or G
ctgtttttacatctaaagcaatagactagaactgaattntcttctacatagtaaaatcacaattgtggaattacaggaattctggtgatattaaggtgaaacaacaaaacacaaaaggccctattttaacagttgatgtgacagtaagttttaatagaacctgtaacttcattttggaaatgcttctccaccaaataaggcctttttcccctatttaaggagccagatggattgaaagatgtggaaataggcag

SEQ ID NO: 612 - DNA, 225 bp, Homo sapiens
  misc_feature 40: n = A,T,C or G
ctgactatatcatgtcaccatcatagccaatacaacattnttgccatacttcctaaaaaccttttcgcatacactgatcatgctacttatcagcactttctaacatcctgaccaaacagacacccacacctcttatagagtacactgtgagagaataacatggacttgatatggcatcacacttgttttaaagcaaaaaaaaaagaaaaagaaaagaaaaaaaaa

SEQ ID NO: 613 - DNA, 471 bp, Homo sapiens
  misc_feature 226, 236, 243, 281, 324, 365, 370, 373, 376, 383, 400, 412,429, 431, 458: n = A,T,C or G
ccatcagacttcttgggtgcctggctatattcaatgtgaagtaaaaaatatcccaagtcttacaccaaaatagaggctctgacttagaagtatgcttttagctttctttttaaataagacattctggaagaaaaaaaaagaaaaaggaaagaaaatcaagtttgaaacacagttaacacttattttggcaagaaagcaaccaaaatctaaaaagcataaactatgngtccaaatgnaaaaggnattacagaacaaactgcaagaggggaaaattaaagccncactgaacgaaaaaatacagtatgtctaacattttggaattgnaatttaaaccctaagggcaaaagctgaaaaatcatgcttanacctnggncgngaccacnctaagggcgaattccancacactggcggncgttactagtggatccnanctcggtaccaagcttggcgtaatcctnggcatagctgttt

SEQ ID NO: 614 - DNA, 421 bp, Homo sapiens
gttattttttagaatggctctcccatcttgagtatgtgtgatgtttcctcatgtatgaatgaagcatatacatctttgtcagaagtatcccagaagcaattctgtactctcctcattatgttctattgggtgggccatggtttttgatttgtctcattactgatgatggttacttttattatttgataaaggttgtatataacttatctattatggcataatacattagctaaaaccttggcggtgtaaaacagcagatacttacgtttctcataggaatggctctattgagtacctctgtctcaaggcttctcaagagtttgtagctaccttgttggctggggttgcggtctgacctaaaggcttagttagggggtggtagaaatcttccatatgttctttgctacgtggacctcacagg

SEQ ID NO: 615 - DNA, 242 bp, Homo sapiens
cctcctatttattctagccacctctagcctagccgtttactcaatcctctgatcaggatgagcatcaaactcaaactacgccctgatcggcgcactgcgagcagtagcccaaacaatctcatatgaagtcaccctagccatcattctactatcaacattactaataagtggctcctttaacctctccacccttatcacaacacaagaacacctctgattactcctgccatcatgacccttgg

SEQ ID NO: 616 - DNA, 392 bp, Homo sapiens
  misc_feature 79, 91, 105, 110, 128, 141, 149, 163, 172, 178, 193, 206,215, 264, 270, 276, 284, 297, 305, 315, 335, 342, 350, 351,359, 373, 392: n = A,T,C or G
cctaatttgtagattgtgaaagcagcttttagtttaacttatttacagaccccttataattaccatgtttttttttttnttcctaaatctnttggttcagcttgngaatnttacgtgcccgtaaagtngggatgttgaatnggcccttntttgttctggcagngagtcaagngtccancattttttcataagngttttttaaaatngttctccancattttatggctcctccctcccatgtcctcaaacccagcaaaagcgtanaggcanaattanaggacccncccgggcggccgntaagggcnaattccagcncactggcggccgttactagnggatccnagctcggnnccaagctnggcgtaatcatggncatagctgtttcctgtgan

SEQ ID NO: 617 - DNA, 215 bp, Homo sapiens
cctactatgggtgttaaattttttactctctctacaaggttttttcctagtgtccaaagagctgttcctctttggactaccagttaaatttacaaggggatttagagggttctgtgggcaaatttaaagttgaactaagattctatcttggacaaccagctatcaccaggctcggtaggtttgtcgcctctacctataaatcttcccactatttt

SEQ ID NO: 618 - DNA, 433 bp, Homo sapiens
  misc_feature 8: n = A,T,C or G
cttttgtntgcctgttttgtggactggctggctctgttagaactctgtccaaaaagtgcatggaatataacttgtaaagcttcccacaattgacaatatatatgcatgtgtttaaaccaaatccagaaagcttaaacaatagagctgcataatagtatttattaaagaatcacaactgtaaacatgagaataacttaaggattctagtttagttttttgtaattgcaaattatatttttgctgctgatatattagaataatttttaaatgtcatcttgaaatagaaatatgtattttaagcactcacgcaaaggtaaatgaacacgttttaaatgtgtgtgttgctaattttttccataagaattgtaaacattgaactgaacaaattacccataatggatttggttaatgacttatgagcaagctggtttgg

SEQ ID NO: 619 - DNA, 259 bp, Homo sapiens
ctgcagtgtccctttttatatcatgctagtgttgagacatacttgactaacttgggaacagttcgatatattgacaaccgtcaacttaagaaaatcaacagcttttggccccagcgtccaagtgaacttttcatggagtgcagaatctcaaatggacaaaatactttgtctttttaaatactgaaaatttaattattagtactatgactgaaagattcttcatggctaaaaagctctgcatcaaactcaattcaggagg

SEQ ID NO: 620 - DNA, 393 bp, Homo sapiens
ccaccaaagccacacggagattctgtcaggcgctgagacaccacagccttttcaatcttagggaaagaaatcaagtcatataaattaatatcaacaggtaaggtcattgagcaattgtctttcaactgtctaagactttatcacttaagatcataaacacagaagcaggtcataaaaatagcttttcttaaggtttaggagaatttgtaggggcacttacttgataatctgaattttctagtcagaagtttaaataccaccttttaaaaacataaaatttaatttgtaacaagttattaacaaagcagtattgtcgaaagttttaagctttctcccaataatttaattacattaattaaatttttaccattctaatggttacaaagtaaccag

SEQ ID NO: 621 - DNA, 563 bp, Homo sapiens
ctgacaatgataaaattatctctatatgggcaaacgcgtgctctttgtcgaagaagaaagcttcagcttcatgttccaggtgagttaattaggcaatgtatgaatgctaatatctctttcacatattttgcttaagatctgtcttaggactctcgtctggcccatatggttttccaagggcagaagggcctctttttgatgagaggcagttttcagtaactcttaaagtgataacagcaaaggagaggagagagaagagtaagacaaatcgaaacattcttcaattgcttcttggccttttggctaagctcaagctcaaaacaggtcttcaaggagaaaatacatcacaaagaaaaggatgttttatttcttaccttgtcctagaaaaatttccataaactctattggcttaattctgtaaacttgaccaatatcagagtgcttcctaccaaggagggtagctgatgagcgtgaccatggtacatcctagaagaatgtgtgatgaagaagctttcaccgtgtaaaagagttgaaaattattcaaggagacattatggtcttgg

SEQ ID NO: 622 - DNA, 505 bp, Homo sapiens
  misc_feature 194, 436, 484: n = A,T,C or G
tcttaagtgtgtttaatagataaagtaaactttcctagtcaagggttagatttttattatctcttgtgttccgactttctacttttcaactttgaacttcaaaaaaacattactttgcttatcctttgtactttgatcaggttgtttagaattgtagatcaaaccattctttgatcattttattgtttaaatgnttagttccatttataatttttatagccaactctcggttatttctgtcttttgagattgcaattcagaagctgtatgtcgaagtaatttatgagttgacttttatacttaggcttctttaaatactaatagtcaagaattctagagcatctaataaaaaattaactttcagatcattgggaatctgtcctcatttaaatatgtgtaaatgcatttccacagcaaattgcttcatgccctttgnctataaggaaattattccttgtagctaatacatttttcattttgcagnccaaatcttttttgagaaagg

SEQ ID NO: 623 - DNA, 489 bp, Homo sapiens
cctactatgggtgttaaattttttactctctctacaaggttttttcctagtgtccaaagagctgttcctctttggactaacagttaaatttacaaggggatttagagggttctgtgggcaaatttaaagttgaactaagattctatcttggacaaccagctatcaccaggctcggtaggtttgtcgcctctacctataaatcttcccactattttgctacatagacgggtgtgctcttttagctgttcttaggtagctcgtctggtttcgggggtcttagctttggctctccttgcaaagttatttctagttaattcattatgcagaaggtataggggttagtccttgctatattatgcttggttataatttttcatctttcccttgcggtactatatctattgcgccaggtttcaatttctatcgctatactttatttgggtaaatggtttggctaaggttgtctggtagtaaggtggagtgggtttg

SEQ ID NO: 624 - DNA, 233 bp, Homo sapiens
gttggggaacagctaaataggttgttgttgatttggttaaaaaatagtagggggatgatgctaataattaggctgtgggtggttgtgttgattcaaattatgtgttttttggagagtcatgtcagtggtagtaatataattgttgggacgattagttttagcattggagtaggtttaggttatgtacgtagtctaggccatatgtgttggagattgagactagtagggctagg

SEQ ID NO: 625 - DNA, 459 bp, Homo sapiens
ttcgagaacatttttaataaataatgtgacaaaattacttttctgattattggattttcagtatgcaaaattatggctaaaaataaggggcttcttacatgaacataatgaaaacattaatcacatggattgttcccttagtactgcacgccttttctatggaactttttcaaattatctaaatgaacaagtttggttttggtgaacaccagcctttttttttgtggttcagttttgtttggctttgtcttccactggggtcagacctgatacttatctatctatgaataaatgtacatttttttcttcaaatagcaccaattataaaatcaatgatattcataaaatgacaaaaaaggatcatagaaatctactagtcagagggcatcatttgtcaattgaaagcaagtaatgcctctattagagattttaaggaaatcttgtaggtttcgacattgg

SEQ ID NO: 626 - DNA, 458 bp, Homo sapiens
cctgatgattgttttaaacagtagaaagggttcagctaagaactacagtccactctcagccctgtcatgtactataggacaagtcttcattcacaacaaatggatagcaacaccaatctcgtaacactgggaaaactgcatacaatatttagaaggaacactaatacagcagaatctgcacacaacggagtcaaagatctgaggccaaatcctactacactttacgactttgagttggtcacttttctgaaccttagcttctccatcagtgtaaaactgatgtaaaataatataaagctatatgaaagctgatgtgatttacttgtgaaatagtatgtgcaaaaggactttgtaaaatgtaaagcactatgctggttattgtgatatctgagatatttttaaagttgcaattcaattcaacaagcattcatttagagtcatgtgcaaggcactgtgct

SEQ ID NO: 627 - DNA, 393 bp, Homo sapiens
  misc_feature 5, 6: n = A,T,C or G
ccatnngaacgcactcaggaggtggtttgttctggatgcagaaaccagagatctagtttctatccacacagacgggaatgaacagctctctgtgatgcgctactcaatagatggtaccttcctggctgtaggatctcatgacaactttatttacctctatgtagtctctgaaaatggaagaaaatatagcagatatggaaggtgcactggacattccagctacatcacacaccttgactggtccccagacaacaagtatataatgtctaactcgggagactatgaaatattgtactgggacattccaaatggctgcaaactaatcaggaatcgatcggattgtaaggacatttgattggaccgacatatacctgtgggctaggacttccagga

SEQ ID NO: 628 - DNA, 233 bp, Homo sapiens
  misc_feature 35, 36, 192: n = A,T,C or G
ctggatttataaaatagttgaatgacaaaagaagnntgttttgacagtaaaaaaaagacattatggacaaaatatgcaaaatgtgcaaagaaaaaataaatttgcattagaaaggtgggcatttgatctctgagccctgtgccatgtaacattgccatgttctttcactgttgtttgaatgttgtaccccancccttgactctggacttaaggcaagctatgactggctttgg

SEQ ID NO: 629 - DNA, 450 bp, Homo sapiens
  misc_feature 3, 11, 240: n = A,T,C or G
ccnggacaatntaggcaggagaaggaaataaagggtattcaattaggaaaagaggaagtcaaattgtccctgtttgcagatgacatgattgtatatctagaaaaccccattgcctcagcccaaaatctccttaagctgataagcaactccagcaaagtcgcaggatacaaaatcaatggacacaaatcacaaacattcttatacaccaataacagacaaacagaggccaaatcacgagtngaactctattccaattgctttcaagaaaattaaaatacctagggatccaacttacaagggacatgaaggacctcttcaaggagaaactacaaaccactgctcaatgaaataaaagaggatacaaagaaatggaagaacattccatgctcattggtagcttgatggggatggcattgaatctataaattaccttgggcagtatggacctca

SEQ ID NO: 630 - DNA, 486 bp, Homo sapiens
cctactatgggtgttaaattttttactctctctacaaggttttttcctagtgtccaaagagctgttcctctttggactaacagttaaatttacaaggggatttagagggttctgtgggcaaatttaaagttgaactaagattctatcttggacaaccagctatcaccaggctcggtaggtttgtcgcctctacctataaatcttcccactattttgctacatagacgggtgtgctcttttagctgttcttaggtagctcgtctggtttcgggggtcttagctttggctctccttgcaaagttatttctagttaattcattatgcagaaggtataggggttagtccttgctatattatgcttggttataatttttcatctttcccttgcggtactatatctattgcgccaggtttcaatttctatcgcctatactttatttgggtaaatggtttggctaaggttgtctggtagtaaggtggagtggg

SEQ ID NO: 631 - DNA, 211 bp, Homo sapiens
tttacataaatattatactagcatttaccatctcacttctaggaatactagtatatcgctcacacctcatatcctccctactatgcctagaaggaataatactatcactgttcattatagctactctcataaccctcaacacccactccctcttagccaatattgtgcctattgccatactagtctttgccgcctgcgatgcagcggtagg

SEQ ID NO: 632 - DNA, 293 bp, Homo sapiens
  misc_feature 191, 262: n = A,T,C or G
cagcgcaagtaggtctacaagacgctacttcccctatcatagaagagcttatcacctttcatgatcacgccctcatagtcatttttccttatctgcttcctagtcctgtatgcccttttcctaacactcacaacaaaactaactaatactaacatctcagacgctcaggaaatagaaaccgtctgaactangctgcccgccatcatcctagtcctcatcgccctcccatccctacgcatcctttacataacagacgaggtcnacgatccctcccttaccatcaaatcaattgg

SEQ ID NO: 633 - DNA, 263 bp, Homo sapiens
  misc_feature 1, 194: n = A,T,C or G
nggtctgcagtgtccctttttatatcatgctagtgttgagacatacttgactaacttgggaacagttcgatatattgacaaccgtcaacttaagaaaatcaacagcttttggccccagcgtccaagtgaacttttcatggagtgcagaatctcaaatggacaaaatactttgtctttttaaatactgaaaattnaattattagtactatgactgaaagattcttcatggctaaaaagctctgcatcaaactcaattcaggagg

SEQ ID NO: 634 - DNA, 491 bp, Homo sapiens
cctactatgggtgttaaattttttactctctctacaaggttttttcctagtgtccaaagagctgttcctctttggactaacagttaaatttgcaaggggatttagagggttctgtgggcaaatttaaagttgaactaagattctatcttggacaaccagctatcaccaggctcggtaggtttgtcgcctctacctataaatcttcccactattttgctacatagacgggtgtgctcttttagctgttcttaggtagctcgtctggtttcgggggtcttagctttggctctccttgcaaagttatttctagttaattcattatgcagaaggtataggggttagtccttgctatattatgcttggttataatttttcatctttcccttgcggtactatatctattgcgccaggtttcaatttctatcgcctatactttatttgggtaaatggtttggctaaggttgtctggtagtaaggtggagtgggtttgg

SEQ ID NO: 635 - DNA, 270 bp, Homo sapiens
ccaattgatttgatggtaagggagggatcgttgacctcgtctgttatgtaaaggatgcgtagggatgggagggcgatgaggactaggatgatggcgggcaggatagttcagacggtttctatttcctgagcgtctgagatgttagtattagttagttttgttgtgagtgttaggaaaagggcatacaggactaggaagcagataaggaaaatgactatgagggcgtgatcatgaaaggtgataagctcttctatgataggggaagtagcg

SEQ ID NO: 636 - DNA, 383 bp, Homo sapiens
cctactatgggtgttaaattttttactctctctacaaggttttttcctagtgtccaaagagctgttcctctttggactaacagttaaatttacaaggggatttagagggttctgtgggcaaatttaaagttgaactaagattctatcttggacaaccagctatcaccaggctcggtaggtttgtcgcctctacctataaatcttcccactattttgctacatagacgggtgtgctcttttagctgttcttaggtagctcgtctggtttcgggggtcttagctttggctctccttgcaaagttatttctagttaattcattatgcagaaggtataggggttagtccttgctatattatgcttggttataatttttcatctttcc

SEQ ID NO: 637 - DNA, 537 bp, Homo sapiens
  misc_feature 26, 516: n = A,T,C or G
ttttaatcctggggtatataggcagnactttaaattgcaaagtcttccgggcctattttcctctacatttttgtaattaactctgggggcttacttgttttggcagtactgaaatcaaaggagctggttcttcttttctcccaattattttcatatgaaagcacctacaattagcctgttagtcctattcagatacatcaaatatcagtgaatgctttactattcgcacatttaagcatctttgttttacataaaattagagtatgaaaaccagtgttcaattttttatcttgttgagcttgtaaaatgccagcaatttaaaactaggacttttccccccataagccaaggaggtagaattactaatacaagggttaaagaaggtagattttgttttcaatatttgggtaatattagaaagattcttcccacagggaagaactagcaagtgtcccaattttttccaaacgttggggaggggaaaattcactgtatcatgaaaccctaagggtttgngtgcacttcctgctttttagg

SEQ ID NO: 638 - DNA, 445 bp, Homo sapiens
  misc_feature 15: n = A,T,C or G
ccagcagaacacagnagtgatttggtcccgtttgttccccagtggggtatctatccttgtgcagggcacaagcctacatggtggctctggtcatatcattagaaaatagacagaaatgggctgcacaccagaatgaatgaattgaattgaaagggaggagtgatggtggaaaaaaaaacaagtcaattcatttagactggtagaaccagaaccactgtgtagtacatccaaacggttaaaattccctggaagatgttacataatcctatcatggtgtttatttatggaaatctattttaaaaattttatgtaatactgcacagtctgtttgcatgatgccttgtacgtagtagcaactcagtaaatactttttgaatgaactagtatagtattttaattagctagtcttcgtgtactggtacaaaagaacagtgtcatcttacag

SEQ ID NO: 639 - DNA, 584 bp, Homo sapiens
gcttgagtattctatagtgtcacctaaatagcttggcgtaatcatggtcatagctgtttcctgtgtgaaattgttatccgctcacaattccacacaacatacgagccggaagcataaagtgtaaagcctggggtgcctaatgagtgagctaactcacattaattgcgttgcgctcactgcccgctttccagtcgggaaacctgtcgtgccagctgcattaatgaatcggccaacgcgcggggagaggcggtttgcgtattgggcgctcttccgcttcctcgctcactgactcgctgcgctcggtcgttcggctgcggcgagcggtatcagctcactcaaaggcggtaatacggttatccacagaatcaggggataacgcaggaaagaacatgtgagcaaaaggccagcaaaaggccaggaaccgtaaaaaggccgcgttgctggcgtttttccataggctccgcccccctgacgagcatcacaaaaatcgacgctcaagtcaagaggtggcgaaacccgacaggactataaagataccaggcgtttccccctggaagctccctcgtgcgctctcctgttccgac

SEQ ID NO: 640 - DNA, 404 bp, Homo sapiens
ccataggaacgcactcaggcaggtggtttgttctggatgcagaaaccagagatctagtttctatccacacagacgggaatgaacagctctctgtgatgcgctactcaatagatggtaccttcctggctgtaggatctcatgacaactttatttacctctatgtagtctctgaaaatggaagaaaatataggagatatggaaggtgcactggacattccagctacatcacacaccttgactggtccccagacaacaagtatataatgtctaactcgggagactatgaaatattgtactgggacattccaaatggctgcaaactaatcaggaatcgatcggattgtaaggacattgattggacgacatatacctgtgtgctaggatttcaagtatttggtgtctgg

SEQ ID NO: 641 - DNA, 138 bp, Homo sapiens
  misc_feature 127: n = A,T,C or G
ctgtgacaggaacattacctgaagtgcagggtggttacctgcacaaagtcccatttccaaaaatttctgtgtaattcaccagaaattttggatggaataattagaaaaaaaaaaagaggttaaaacntgtaactcaaa

SEQ ID NO: 642 - DNA, 381 bp, Homo sapiens
  misc_feature 372: n = A,T,C or G
ctgtaggtggaatttttacccagaaaagataggccctagaagcctcatttcttttctccatggaaaaggacagccctctgctgcagcgttcaacttgtgtgtttactgacagagtgaactacagaaatagcttttcttcctaaaggggattgttctacattttgaagttattttttaataaaattgaattatgttgtgtattgtgcttcctaataggaaatgcattattggactgtttttgtaacatcctgtttattgcaaatagctagtatcgttcaaaaactgtataaaatacttttgtacatattagcaatgtctaatttgtatacacttcagttaaatttccctaaaacttgaaaggggaccttgtanaaattaaaa

SEQ ID NO: 643 - DNA, 403 bp, Homo sapiens
ccttcctaaaaaatagtggtgagctggaggctacttccgccttcttagcgtctggtcagagagctgatggatatcccatttggtcccgacaagatgacatagatttgcaaaaagatgatgaggataccagagaggcattggtcaaaaaatttggtgctcagaatgtagctcggaggattgaatttcgaaagaaataattggcaagataatgagaaaagaaaaaagtcatggtaggtgaggtggttaaaaaaaattgtgaccaatgaactttagagagttcttgcattggaactggcacttattttctgaccatcgctgctgttgctctgtgagtcctagatttttgtagccaagcagagttgtagagggggataaaaagaaaagaaattggatgtatttacag

SEQ ID NO: 644 - DNA, 688 bp, Homo sapiens
  misc_feature 653, 666: n = A,T,C or G
cctatttatttgttttggccctggatctttcctaatcacaattatatttctttatttttgcctttgagcagtttcatttatctttgtgggcagggaagattaaatatgaaattcagtccagtcattttgctactggttagctttagtttgaggcaagtaaaaatttttgattaaaattagtttcttaaaattatgcccttgctttaccaaataatcaaattggctaaaaaataagggtatgtaactttgcattttgaagaacaaaccaataatttttcatgagccctactcgatcttctttaaagaagaccttcctaagagacaattagggatgagtttgattaatgggaaatagctctaggttagattattttaaattccatacaccaagtgatttaaccacagtggcagtggcagcttctgaaccgtcaagtatgaacatcacttaaaaattaaaagatgcttaataataaactcttaattttcattaagccaatctgtaattcagaagaaaagcatatgtctgccatgggactattgcagtgcgtctccatcagtgttaacacaggagagatatgttattttatgtgtatgtcttagtttgggatatgtggtagtaagaacatgtcaagagtgcttttcttcaaacctgncagctcaactgangaaagacaggtacttccattgc

SEQ ID NO: 645 - DNA, 484 bp, Homo sapiens
  misc_feature 460: n = A,T,C or G
ccaaatgtgtctccagcccacacttccaggtggcagagcgagctctctattactggaataatgaatacatcatgagtttaatcagtgacaacgcagcgaagattctgcccatcatgtttccttccttgtaccgcaactcaaagacccattggaacaagacaatacatggcttgatatacaacgccctgaagctcttcatggagatgaaccaaaagctatttgatgactgtacacaacagttcaaagcagagaaactaaaagagaagctaaaaatgaaagaacgggaagaagcatgggttaaaatagaaaatctagccaaagccaatccccaggtactaaaaaagagaataacatgaaaacgcccagggttacttgaatgtttttataagataggaatatatgtcttcaccatgggggggggtctcggatttcactaacgttgtatatgaaaatgggtgcnataaaaagtacttttaaactttgt

SEQ ID NO: 646 - DNA, 447 bp, Homo sapiens
  misc_feature 413: n = A,T,C or G
gggtcgcgttgaacaacttggttcaagatggtgggggcatttttagagcggcaataattgaaaaaaaaggcgaactctgccttggagaggtagatgataagaaataaaaaggtgtttataactattttgtattataaagtgggccttagagataggaagaagaatgatggattccttttggatcaatcagaaaggaaacacgaaagaaaagtcaggaaggtagagagagaaaaagggagggaaggagaaagaatgggaataaaataaggaggtaagagatactatttttgctgagcaaccagtgtgtttcaggatgatacaaagaaaaatatagaatagaaataagtgcaggcttggaatcagctacaaatcctaaagatggggtgtgtgtggatgtgtgtgtgtgtgtgtgnacaccattgtgtgtttgtaaaatgtgtatgtccc

SEQ ID NO: 647 - DNA, 388 bp, Homo sapiens
gaaggtgatataaaatgactgtcatcatttggagtgtgcagtacagttacttcatgttcctcaggtttagaacaatttcccctgcaagttctcacacagataggcagaaatcataactaattttggttaatcactatggcagccgttgaagaatttaagagaacctgccagtaagatttggaataagattctatattattgcatccacagaaaagaatgtactgatatactataaactctaggagaaaacttaattgaaatagtgttattaagtgttgaaagtaccataaaaatataagggaaaataagctttcctagaatttttcagtgttctagtttttaaacagtgatgttttttattaacctatttcatccattcaaagacagg

SEQ ID NO: 648 - DNA, 632 bp, Homo sapiens
  misc_feature 12, 24, 33, 483, 539, 626, 629, 630: n = A,T,C or G
cctggctgggcntttgacctgcgnttttaaatnactcacagagggtgggacaggaggaagagtgaaggaaaaggtcaaacctgttttaagggcaacctgcctttgttctgaattggtcttaagaacattaccagctccaggtttaaattgttcagtttcatgcagttccaatagctgatcattgttgagatgaggacaaaatcctttgtcctcactagtttgctttacatttttgaaaagtattatttttgtccaagtgcttatcaactaaaccttgtgttaggtaagaatggaatttattaagtgaatcagtgtgacccttcttgtcataagattatcttaaagctgaagccaaaatatgcttcaaaagaagaggactttattgttcattgtagttcatacattcaaagcatctgaactgtagtttctatagcaagccaattacatccataagtggagaaggaaatagatagatgtcaaagnatgattggtggagggagcaaggttgaagataatctggggttgaaattttctagttntcattccgtacatttttagttagacatcagatttgaaatattaatgttacctcctcaatggggtggtatcagacctgcccgggcggncgnntc

SEQ ID NO: 649 - DNA, 300 bp, Homo sapiens
  misc_feature 1, 15: n = A,T,C or G
nggtgaagatagaanaaatataagcgaaattggataaaatagcactgaaaaaatgaggaaattattggtaaccaatttattttaaaagcccatcaatttaatttctggtggtgcagaagttagaaggtaaagcttgagaagatgagggtgtttacgtagaccagaaccaatttagaagaatacttgaagctagaaggggaagttggttaaaaatcacatcaaaaagctactaaaaggactggtgtaatttaaaaaaaactaaggcagaaggctttggaagagttagaagaatttggaagg

SEQ ID NO: 650 - DNA, 498 bp, Homo sapiens
  misc_feature 1, 4, 8, 26, 255: n = A,T,C or G
ngtnctgntaaacagaagggtacaangcccttctggctttaagcagtcataggaatgtgacagacattcctcttagggagcgcctcctcctagggtttcctcatctgtctcacactgagtggatgtaatgctattttaatcctgctgtggcccccaatactagtacttgtccataccttcttgcatttttagcgtctgctctgtggggttgttaggccctggcactcccaggaactagtgctaaagctgcatctntctctcccctctagggatcgataaagtttcactgcagaaagtctccactgcggtatgctgacatctgccctgaaccttcaccctacagcattacaggctttaatcagattctgctggaaagacacaggctgatccacgtgacctcttctgccttcactgggctggggtgatccttggtgcctttgtttccacaaggccttttcctgccccctgccttgccaaagacatttaatcagcacacag

SEQ ID NO: 651 - DNA, 654 bp, Homo sapiens
  misc_feature 149, 268, 375, 508, 578, 595, 615: n = A,T,C or G
ctgagggtccccaggtttctaaagctctcaggacgagaaagtaggtcccaagataaggagcctaaagggcttttttctttctgtgtattccttcttggcctccaacatgggtacagtcacaagagcatgtaacagagaagaaggactanacctaccattttctggataaagaattggaaagaggatccacaggtaaccaaaaagtaccagggaaatggcagagaaggaaaacctcaggagaccaacctcataagtggtatttattagngcctgggctcaaatccaaattgtacatgaatatgtctggtcctagatagggtaccgaagactttgaaagtgaattttggtatatcattgcccagattccagactggntattgtgtgacacaacatacaggatatatctgaatagtgctcagaagagtttgaaaatgcaaatgatattaaaataaagatgaaaaagagaaagctggtcagaacttgtggacataacccttctggatctgtngcctgattaaaaaatagttgatattctcgaatgaattaaaacaagatttagagactgagcatggtagctnattcttgtaatccaacnctttgggagggcaaggcaanagaattgcttgcggccaggagttttgagaccagcttggg

SEQ ID NO: 652 - DNA, 293 bp, Homo sapiens
  misc_feature 1, 193: n = A,T,C or G
ngtctgttgcactgaggtgactaaggatacattttgaggaagtagctccaagaacatttccattttcactgtgccttcacatacatctaatggaaatgaacagcacccttcatccatccacggaagcgattaagaaaagggtgggatggaaaaattaacccaacaatattagatcaatacgtagtatttaagngtccataatgtgccaggctgaagatgcacgggaaaaccacactagccggtctgtcaagggcttgagaataccataaacaagaaaacagacgaaccaattt

SEQ ID NO: 653 - DNA, 294 bp, Homo sapiens
  misc_feature 1: n = A,T,C or G
ngtccaccactgcagccctacatacagttgaaaaaaaattccattctgttaacatttgttttataagttttcacgcaatacacaaaaaacccctctgcacttcttgtaaagaacaaaaaagatacacaacagttaagcgtaaagatcacaggcaatagcattcaaacatggatgtgggtagagaaaggagtacctggcatgagtacctgcttagtttgactgaatccttgatttttaatttggcttttcatgggccgctcacaacaccaacgctgtgtgaggtatggtagtcag

SEQ ID NO: 654 - DNA, 250 bp, Homo sapiens
ctgtccttgaacaagtatcaatgtgtttatgaaaggaagatctaaatcagacaggagttggtctacatagtagtaatccattgttggaatggaacccttgctatagtagtgacaaagtgaaaggaaatttaggaggcataggccatttcaggcagcataagtaatctcctgtcctttggcagaagctcctttagattgggatagattccaaataaagaatctagaaataggagaagatttaattatgagg

SEQ ID NO: 655 - DNA, 494 bp, Homo sapiens
ccattataattttataacaccattaccctttaaattctaccgattataagcagcgtaaaagtaactatataaagcaaacatcgcaaaggaactctgcaggagctcttaattcctttatgtagctatcataaaattcactttcctgaagacatttactctcattcacttccaaactccaaacctttttctggtagcaccacttttgtttttaatagaaagatgagttcatatctgtacatctctccaaagctctaaggaatgagaaaaggatcctagtatattgaaattactgatgtttaatacctctgccttttcactaaaagccatttaatatttttaaagtcaaaacttgacatacaggtatttataaggaatctccatgactctgaaggaatgaaattgatgtaggtagctttggctatgtaaagacatagtagaggacaattacttaaagaagagttttcttttgaggatttgtagatttgactaagcag

SEQ ID NO: 656 - DNA, 477 bp, Homo sapiens
cgcgttactgtacatattgctagcaggagacaactggaaatactaaacaaatactggaattcacattacagacagacgaaaccaacatggatgccacacataacttcctttgtagtttcacagagggcctatttgtggttgctcaggtggggtcatacattgcttgcagaaatggcctgatcatagctctatgaaacaatgaattcggaatgaaatcttaccatgacacctctctgtaggaaagaaatgttgcttcacgtgtgctaagttgagataataatatttcacatatttatatacagagaatcactctcaaatttaacccaagataagcaataggatttgggggtgacttgtacacatttctaacaacacttttcttttttctagaggtcactctcaaacactgatatatcactatagtttgagtgtagggattcagtaatcaaaggttgttattgcaaaagagccaggcag

SEQ ID NO: 657 - DNA, 576 bp, Homo sapiens
  misc_feature 13: n = A,T,C or G
cctctacctgtanatcactatttttctaaagacaatttggtgttttgaagataaatgtcattagtctatgataatagcatcataggacaattagccattttagacttgaccatattttctctttttagcatatagccatcttgatatttaggtgggagactactccaatggagcaacagtttcattttacatgattggatttagaaatttacaaattttaaactcataagaattctaaataatttgaaaatggaaacatttgacccacagtctagcagcataaatacatttataaaatacttcattgttgatcttaggtcattgatttaaaacagaatttggtgactatgggcaggtggagggggccagtgaggaaggtataaaagagaaatctttatgaattgtgttcagattgattttgtataaacataatatattcatggttgtatctcttatttataatacccaactaacatgaaggtggtccaagggaaggatcaatattttaaataacatatttgcttaaaatatcatacagtggctgcttcataaaaaatcttataaacttttattacc

SEQ ID NO: 658 - DNA, 344 bp, Homo sapiens
  misc_feature 14: n = A,T,C or G
cctgaaaagaaagntgctcttatggactcttgcatgttaagactatgtcttcacatcatggtgcaaatcacatgtacccaatgactccggctttgacacaacaccttaccatcatcatgccatgatggcttccacaaagcattaaacctggtaaccagagattactggtggctccagcgttgttagatgttcatgaaatgtgaccacctctcaatcacctttgagggctaaagagtagcacatcaaaaggactccaaaatcccatacccaactcttaagagatttgtcctggtacttcagaaagaattttcatgagtgttcttaattggctggaaaagcaccag

SEQ ID NO: 659 - DNA, 230 bp, Homo sapiens
ctgctttccctgctaaacagttccagagcaaaagcagcaaaaagaaaatatgggagggatatgggcaacgtatactcgaacgtacgcagagaagagagtacggttagctctaatatttctcattgaacttggtggtatgtgccttccctgcatataaggccatagtgcttttttgggagcgctagaatatccatccacttgacagtgaccacaaaataggctgtttccag

SEQ ID NO: 660 - DNA, 80 bp, Homo sapiens
ctggtccttgttaaactcgatcaccactttggagagatcgactggaggctcctgggtgttctgaggggcctgggggacag

SEQ ID NO: 661 - DNA, 535 bp, Homo sapiens
  misc_feature 411, 413, 416, 422, 439, 470, 471, 479, 490, 492, 496, 501,511: n = A,T,C or G
ctgaaccatatctgattaactctttggtctctgttattggaacaaaaccgacgctatgcctgcagccgccagactgcaaccaaaaacacagtttggggtcagaagacattaaaaatcacaataaaataggatgaatgttctaagtcacgcaactgaatcaaggcacctttttttttcaaaagcaaaaagttgtttaacaatattccagaatagtagatacttcaaaaaccagattacagtatatatcattttgctgcacattttagtctattttctgtatacatagtcacacattctttaccctctcccaacttatacatgctttatccccccagtcatgtgctatgtaggtataaaaaaataaagttgtatctaaacaagtgatttaaaaaaaaaaactaacgaatgccncnatnataacnctgaacttgtttccctnttgaaggacattggaaatgttaccgaggttnntttacctnggccgcaaccncnctangggcnaattccagcncactgggggccgttactaggggat

SEQ ID NO: 662 - DNA, 257 bp, Homo sapiens
cctgactaaagcacatatcacactccctacacttccatgttttctctcccatgtggaccctctgatgcatatcaagattcaagcgcctgttgtagcccttcccacagtcctcacatttgtatggcttttctacactgtgaactttttcttgcactttagagaatgaattctgtacaatgttcttcccatgctgctcacatttgagaggtgtttctctgctgtggcgtctctgatgggtcagacgagttgaggaccag

SEQ ID NO: 663 - DNA, 516 bp, Homo sapiens
  misc_feature 36: n = A,T,C or G
ccaattataggtattttattttttaaagattagagngttcttgaagctctttctatttctttgtcaatgaactaaacattggcaaatatgtagggtttcccacataagaacattattaacatcaaaatagaaagctggtggtagaaataatgattgggaacacagagtctctactcagcgttctacttctgccataccataactttgtgatctcacgaaatatctctccatgttctcatccctatgtatagttctgtcatttttcaataagagctttttgcttaattatgaagtactagttactataaccattattttgagcttcatgtaaatcaagaacacatggactccacttgcaaaacattgaaaatgtagttagggattgggggcaaaaagcaacattttaaaatgtgtaaagacaatgagtaagcaacaaagtgtccaattttttaggcgaaagttgcatatgtcaggaaaaggcaggattaagtaatagagaatttgaatgataactgg

SEQ ID NO: 664 - DNA, 212 bp, Homo sapiens
gtccgaggaggttagttgtggcaataaaaatgattaaggatactagtataagagatcaggttcgtcctttagtgttgtgtatggctatcatttgttttgaggttagtttgattagtcattgttgggtggtaattagtcggttgttgatgagatatttggaggtggggatcaatagagggggaaatagaatgatcagtactgcggcgggtagg

SEQ ID NO: 665 - DNA, 408 bp, Homo sapiens
  misc_feature 11, 18, 24, 270, 271, 275, 277, 280, 281, 287, 291, 295,298, 319, 325, 335, 337, 341, 344, 356, 360, 371, 375, 376,388, 390, 401, 407: n = A,T,C or G
atccaggggtncccggtngctgcngggaaacctccagccttgttcttcaaaccactcagctcatgtgttttgcgctgactagtactgaataatacaaccactcttatttaatgttagtattatttatttgacaactcagtgtctaacagcttgatatgcaggtccttgcatcctacatttctttaggaagttacccatttgtaactttaaaaacaggaaaaatatcagttggcaaatgcaatcttttttttttttaagctaaaggggggnnaacngnaannaaaatntttntgangtngggtctataagcacccttgangggatntgttaaaagngncatnaangggggattctcntttngcaaaaaaatntaannatcaatttatananctttatttttnactttnt

SEQ ID NO: 666 - DNA, 635 bp, Homo sapiens
  misc_feature 7, 503, 540, 564, 577, 581, 616, 635: n = A,T,C or G
ctgaagnacaagggtcaggcaaaaataagatcacaatcaccaatgaccagaatcgcctgacacctgaagaaatcgaaaggatggttaatgatgctgagaagtttgctgaggaagacaaaaagctcaaggagcgcattgatactagaaatgagttggaaagctatgcctattctctaaagaatcagattggagataaagaaaagctgggaggtaaaccttcctctgaagataaggagaccatggaaaaagctgtagaagaaaagattgaatggctggaaagccaccaagatgctgacattgaagacttcaaagctaagaagaaggaactggaagaaattgttcaaccaattatcagcaaactctatggaagtgcaggccctcccccaactggtgaagaggatacagcagaaaaagatgagttgtagacactgatctgctagtgctgtaatattgtaaatactggactcaggaacttttgttaggaaaaaattgaaagaacttanctctcgaatgtcattggaatcttcacctcacagtggngttgaaactgctatagcctaagcnggctgtttactgntttncattagcaggtgctcaccatgtctttggggtgggnggggggagaaagaaagaan

SEQ ID NO: 667 - DNA, 388 bp, Homo sapiens
gaaggtgatataaaatgactgtcatcatttggagtgtgcagtacagttacttcatgttcctcaggtttagaacaatttcccctgtaagttctcacacagataggcagaaatcataactaattttggttaatcactatggcagccgttgaagaatttaagagaacctgccagtaagatttggaataagattctatattattgcatccacagaaaagaatgtactgatatactataaactctaggagaaaacttaattgaaatagtgttattaagtgttgaaagtaccataaaaatataagggaaaataagctttcctagaatttttcagtgttctagtttttaaacagtgatgttttttattaacctatttcatccattcaaagacagg

SEQ ID NO: 668 - DNA, 498 bp, Homo sapiens
  misc_feature 417, 470, 484: n = A,T,C or G
tgatcttaacaaaattcgtagcagtggaaccttgaaatgcatgtggctagatttatgctaaaatgattctcagttagcattttagtaacacttcaaaggtttttttttgtttgttttctagacttaataaaagcttaggattaattagaagaagcaatctagttaaatttcccatttgtattttattttcttgaatacttttttcatagttattcgtttaaaaagatttaaaaatcattgcactttggtcagaaaaataataaatatatcttatgaatgtttgattcccttccttgctatttttattcagtagatttttgtttggcatcatgttgaagcaccgaaagataaatgatttttaaaaggctatagagtccaaaggaatgttcttttacaccaattcttcctttaaaaatntctgaggaatttgttttcgccttacttttttttcttctgtcacaatgctaagnggtatccgaggttnttaatatgagattt

SEQ ID NO: 669 - DNA, 622 bp, Homo sapiens
ccttagccaaagaatgcagtggagccttcccccttcaactgcattgtgaatgaataccaattaacagcataaaaattaatagtcccatatcagatctggaaggggtttctggggctgtctgatgtccctatcctgttgtagtgaacacaatagcagaaaattctttctgggtccatctgctataaagtcttggtaaaacagcattactatgaagaggatgaactcacctaccttcagatggaggaaaagtgaaaaggacttaggctttagtcctccatgacttttcttaagcactacctacctgtaataagctgagtgcaaaaggatgccgaagaaaatctgcacccagaagctgttagaaagcactgcagagaacagggtatgaagaaaataaagagttcttaataaacccttaagattctttgttcaaggtaaccttgccaaaagggcagagtaggtggcaaagagttgcttttaatctagctctacactgcatttgaaaataaaatttgcccattttgaatatattgtttataattaaatgtgctttttacactgcaggtcaatataaaaactggttagtaaatttccagcgagcatttatgttcatttgctcacagca

SEQ ID NO: 670 - DNA, 477 bp, Homo sapiens
ttgggccctctagatgcatgctcgagcggccgccagtgtgatggatatctgcagaattcgcccttgccgcccgggcaggtgatggatgaggagcaaaaactttatacggatgatgaagatgatatctacaaggctaataacattgcctatgaagatgtggtcgggggagaagactggaacccagtagaggagaaaatagagagtcaaacccaggaagaggtgagagacagcaaagagaatatagaaaaaaatgaacaaatcaacgatgagatgaaacgctcagggcagcttggcatccaggaagaagatcttcggaaagagagtaaagaccaactctcagatgatgtctccaaagtaattgcctatttgaaaaggttagtaaatgctgcaggaagtgggaggttacagaatgggcaaaatggggaaagggccaccaggctttttgagaaacctcttgattctcagtctatttatcag

SEQ ID NO: 671 - DNA, 127 bp, Homo sapiens
gtgtgtgtgtctacttgggcgtgtttaacgtgtgcgtttgtgtctgcgtgtgcatgtgtctgtgtgtgcgcgtgtatttcagtttgggttgccggatcccatatgattgcgtgcctgtgtacctgag

SEQ ID NO: 672 - DNA, 400 bp, Homo sapiens
gggtctgcacagctatgttaacagcatccttataccaggagtaggaggaaagacacgactggaaaagcaattcaagctggtcacacagtgtaatgcaaaatatgtggaatgtttcagtgctcagaaagagtgtaacaaagaaaagaacagaaactcttcagttgtgccatctgagcgtgctcgagtgggtcttgcaccattgcctggaatgaaaggaacagattacattaatgcttcttatatcatgggctattataggagcaatgaatttattataactcagcatcctctgccacatactacgaaagatttctggcgaatgatttgggatcataacgcacagatcattgtcatgctgccagacaaccagagcttggcagaagatgagtttgtgtactgg

SEQ ID NO: 673 - DNA, 600 bp, Homo sapiens
  misc_feature 528, 590, 600: n = A,T,C or G
ctggcgttgctcattagtgaatgtatgacagcaggatgtgaggggatgcccaggagtcagtgttagcattgtcatctgagatcactgctattaatatcatccattaatttattagtgagcttcactatatgcagactgggagataaggagaaaatctgtcacattctctctagctaatcagatcagctaccaattaatgagattctgaatgaaatatcaatatgtgtttttctaatttggacctaggacagagctgttgcttgtcatagagaaaaacaataatgcttaaacatagcacattataattaaagcaggtttctcacatacttttcattttatcctttggataattttgtgaggaacgcaggacaccaacttccctttcatagatacaatccccatgctattgatgaaagtgtttttgaatgaagccatacaacaaataactgatcaaagtggcattacaccaaaatttcttagtaggactcctgcatagaatgtttagatagacgtgaaaagtttgttcangaggaccagcaagagagaaactgggttctttgggagggtttcggtgctacatttataccctncatcagagtn

SEQ ID NO: 674 - DNA, 140 bp, Homo sapiens
ggtggttggtgtaaatgagtgaggcaggagtccgaggaggttagttgtggcaataaaaatgattaaggatactagtataagagatcaggttcgtcctttagtgttgtgtatggctatcatttgttttgaggttagtttga

SEQ ID NO: 675 - DNA, 245 bp, Homo sapiens
gttgggtggttggtgtaaatgagtgaggcaggagtccgaggaggttagttgtggcaataaaaatgattaaggatactagtataagagatcaggttcgtcctttagtgttgtgtatggctatcatttgttttgaggttagtttgattagtcattgttgggtggtaattagtcggttgttgatgagatatttggaggtggggatcaatagagggggaaatagaatgatcagtactgcggcgggtagg

SEQ ID NO: 676 - DNA, 621 bp, Homo sapiens
  misc_feature 13, 21: n = A,T,C or G
ctgtccccagggnaaatagtngaattcaactaagatctgttaataagatgtcagaataactaataattttattaggaaaaaatcatgttttaaatttcaaaatgacacttatttgtcaagtaatatgatcttggaaaattttaaagaaaaataatcctacttataaactacttttttataattgttttcagaaaaaaagtttacagtcttaaggaaaatattcaggtctatcatatggtttgacagattttttaaaagttatttttggtaaggtcttcttttagaaaaaaattaatctcaagggttttttgtaccactataatctctaatacttactcagaattactgtgtatttacttaatttcttattatgtgccttattatgtgcttaagatacaataggttagagtttaatctaaatatcttgaaagctatattgtgggcttggtaagcattttgttttttctttctctgttttggtaaggatttaaaatttttttcattgcaattttaagtggttttcaataagtaatagtttttatcaaatttttggtgcttggtgcagagacggcgtggggaagggtgaatggttttgggaataattcagtgcacacctggggg

SEQ ID NO: 677 - DNA, 210 bp, Homo sapiens
  misc_feature 10: n = A,T,C or G
tttacataanatattatcagcatttaccatctcacttctaggaatactagtatatcgctcacacctcatatcctccctactatgcctagaaggaataatactatcactgttcattatagctactctcataaccctcaacacccactccctcttagccaatattgtgcctattgccatactagtctttgccgcctgcgaagcagcggtagg

SEQ ID NO: 678 - DNA, 383 bp, Homo sapiens
  misc_feature 86, 119, 120, 139, 140, 148, 162, 167, 175, 184, 222, 227,263, 270, 282, 327, 379: n = A,T,C or G
gtaggagtcaggtagttagggttaacgagggtggtaaggatggggggaattagggaagtcagggttagggtggttatagtagtgtncatggttattaggaaaatgagtagatatttgannaactgattaatgtttgggnntgagtttntatatcacagccanaattntatgatgnaccatgtancgaacaatgctacagggatgaatattatggagaagtantctantttgaagcttagggagagctgggttgtttgggttgnggctcantgtcagttccanataataacttcttggtctaggcacatgaatattgttgtggggaanagactgataataaaggtggatgcgacaatggattttacataatgggggtatnagtt

SEQ ID NO: 679 - DNA, 371 bp, Homo sapiens
aaaatgaaaatattgacaagagtttcagatagaaaatgaaaaacaagctaagacaagtattggagaagtatagaagatagaaaaatataaagccaaaaattggataaaatagcactgaaaaaatgaggaaattattggtaaccaatttattttaaaagcccatcaatttaatttctggtggtgcagaagttagaaggtaaagcttgagaagatgagggtgtttacgtagaccagaaccaatttagaagaatacttgaagctagaaggggaagttggttaaaaatcacatcaaaaagctactaaaaggactggtgtaatttaaaaaaaactaaggcagaaggcttttggaagagttagaagaatttggaagg

SEQ ID NO: 680 - DNA, 176 bp, Homo sapiens
cctaggattgtgggggcaatgaatgaagcgaacagattttcgttcattttggttctcagggtttgttataattttttatttttatgggctttggtgagggaggtaagtggtagtttgtgtttaatatttttagttgggtgatgaggaatagtgtaaggagtatgggggtaattatg

SEQ ID NO: 681 - DNA, 152 bp, Homo sapiens
ctggagatggatatgagactagtcaagatgtgaatgctaattggagagaaatataattttaggaagatgcacattgatgtggggttttgatgtgtctgattttgactactcaagctctgtttacagaagaaaattgaatggcgagggtgtgg

SEQ ID NO: 682 - DNA, 141 bp, Homo sapiens
ccagtgcttgcttgccgtggtttagtgattgggtgttagaaataaaaactcaggtctatttcttaccagtcagtaacaatttttagagaatgtacttggtatataatatatggacttcaggaactttgttggggtgggggg

SEQ ID NO: 683 - DNA, 308 bp, Homo sapiens
ccagcaatggtacagagtgagggtgttctgctaatgacttcagagaagtatttaagaaaaacatagaaaaacgtgtgcggagtttgccagaaatagatggcttgagcaaagagacagtgttgagctcatggatagccaaatatgatgccatttacagaggtgaagaggacttgtgcaaacagccaaatagaatggccctaagtgcagtgtctgaacttattctgagcaaggaacaactctatgaaatgtttcagcagattctgggtatcaaaaaactagaacaccagctcctttataatgcatgtcag

SEQ ID NO: 684 - DNA, 277 bp, Homo sapiens
tggtattaggattaggatgtgtgaagtatagtacggatgagaaggttggggaacagctaaataggttgttgttgatttggttaaaaaatagtagggggatgatgctaataattaggctgtgggtggttgtgttgattcaaattatgtgttttttggagagtcatgtcagtggtagtaatataattgttgggacgattagttttagcattggagtaggtttaggttatgtacgtagtctaggccatatgtgttggagattgagactagtagggctagg

SEQ ID NO: 685 - DNA, 457 bp, Homo sapiens
  misc_feature 10: n = A,T,C or G
ctgtggcgtnccctacttctcccaaacctcgcaactccctcccaggacagtcagtgccaaagaaacaggtcgctgaaaactaaaatgtccacatccctaactggcaacccacatcaaccccaaaaggttgaagaatcatctaagatatttcagatgctctatgaagaaattcactttaacacttataactgtaagactttgcatacattacaacagtgcattagtgatacaagttgtaaaatacgtttccattcctttggattttgcatatgatggttttgcatcagtcactgcaggtagattgagcaagctttttgtgtttgtttttttaaacatgcattcaactagatatgattcagaatagattaatactccctttttatcactacagttagctaaaaaattgccaggcagtccacaaaacagaatttgctttaagaccaacccacagagtcag

SEQ ID NO: 686 - DNA, 234 bp, Homo sapiens
  misc_feature 1: n = A,T,C or G
ntggatttataaaatagttgcaatgacaaaagaagtatgttttgacagtaaaaaaaagacattatggacaaaatatgcaaaatgtgcaaagaaaaaataaatttgcattagaaaggtgggcatttgatctctgagccctgtgccatgtaacattgccatgttctttcactgttgtttgaatgttgtaccccagcccttgactctggacttaaggcaagctatgactggctttgg

SEQ ID NO: 687 - DNA, 315 bp, Homo sapiens
  misc_feature 1, 2, 190: n = A,T,C or G
nngtctgtgaaaaactctttggatgattctgccaaaaaggtacttctggaaaaatacaaatatgtggagaattttggtctaattgatggtcgcctcaccatctgtacaatctcctgtttctttgccatagtggctttgatttgggattatatgcacccctttccagagtccaaacccgttttggctttgngtgtcatatcctattttgtgatgatggggattctgaccatttatacctcatataaggagaagagcatctttctcgtggcccacaggaaagatcctacaggaatggatcctgatgatatttggcag

SEQ ID NO: 688 - DNA, 522 bp, Homo sapiens
  misc_feature 31, 32, 387: n = A,T,C or G
ctgaattagaggaggagaaaagaagccattnnggagtactttaattgtttagatgtgagaggctgaatgtttgggttaagatgttagttgtcagaatcatgagaaaaggttttaagcaaggggcatttctaattctaaaaataacaactactgttatttattgagcactatctttttgttgggtactgtctaaagtacttgatttattttttaaaaccttacaaaaaacttacaaggtaggtactgaaagattcagtaatttgttcaaagtcacacagcaaataagcaacagactctggatttgaaccaggcaatcctagagcctgtactgttagtaattatactttagcacctgtcaagaattcctgttgagtgtcaagaagcaancaccaagttaggatttaaagcaaacatgattgaagaatactgtggtgtggttgacagtagtgcctaagtctgttttcagagtgaaaaatgacaaattagattttaagtatggtttggagataatatcaggacagt

SEQ ID NO: 689 - DNA, 158 bp, Homo sapiens
  misc_feature 11, 13, 15, 34, 51: n = A,T,C or G
tctcaacttantntnatacccacacccacccaanaacagggtttgttaggnattgtttgcattaataaattaaagctccatagggtcttctcgtcttgctgtgtcatgcccgcctcttcacgggcaggtcaatttcactggttaaaagtaagagacag

SEQ ID NO: 690 - DNA, 300 bp, Homo sapiens
  misc_feature 33, 261: n = A,T,C or G
tagaactcgtatttttaaacttctattctctanccttttccactacattatgacacaagaccctgcagaaagtcgtctggaaaatatcagaccatctcttacttgtcccatccaatcttacatcgaattatatgcacccttaaaaagttatttggagttttaaaaaactctattagcccaaattacctgaaataaactcctggcttgttcccctaatgtttataaaaaattgattgaaaatattcattttaaaaatgaagntcttgaatttatttaaattactgtcttgcagtgagttgg

SEQ ID NO: 691 - DNA, 305 bp, Homo sapiens
ctgttcagaaagctcattggacctggttttgaaaataaaacaaagttaaaaccctgggaggagttattgtgcagtgtggagtactcaggctttcttataaagaaaaaaaaagttatctggtaccaaagtgtgcaacctacagaccctcaggtactgccctgtgacttctctgtatgacatcacaaggctgccaagtgcctgtttttctagaactaggagttggtgaggtttggctagtgctgaaaccatgcataggattggtttactaaattaaaaccttattacgtacgtcctccaaaagacag

SEQ ID NO: 692 - DNA, 582 bp, Homo sapiens
caggaaatggataaccattttaactgtattttttgcagcccgtaccttcttgggaatacaattgtctaactttttatttttggtctggctgttgtggtgtgcaaaactccgtacattgctattttgccacactgcaacaccttacagatgtggaagatgtgaaatttgtcatcaattatgactaccctaactcctcagaggattatattcatcgaattggaagaactgctcgcagtaccaaaacaggcacagcatacactttctttacacctaataacataaagcaggtgagcgaccttatctctgtgcttcgtgaagctaatcaagcaattaatcccaagttgcttcagttggtcgaagacagaggtgcaggtaaggatgactgataggaaatgttggtagttacgagtcacatcgttgtctacaaatccatttaaatggtattggagggtgagtaaaaccttgaatgtgaaaacttaagctgaaaaattgtaaaaacatttcacgcctaccatgaatagatctgtttctttctgtccacaatgatttgtgtcatagacataattgatcaatttgcaattg

SEQ ID NO: 693 - DNA, 275 bp, Homo sapiens
ccaattgatttgatggtaagggagggatcgttgacctcgtctgttatgtaaaggatgcgtagggatgggagggcgatgaggactaggatgatggcgggcaggatagttcagacggtttctatttcctgagcgtctgagatgttagtattagttagttttgttgtgagtgttaggaaaagggcatacaggactaggaagcagataaggaaaatgactatgagggcgtgatcatgaaaggtgataagctcttctatgataggggaagtagcgtcttg

SEQ ID NO: 694 - DNA, 397 bp, Homo sapiens
  misc_feature 1: n = A,T,C or G
nggtctgcatttttattgcgatctgcagatgaactggaaaatctcattttacaacagaactgagacagacgaccaccatattcactgaggtctaaatttgcagtttccactaatgacattttgatttcccaacagagatacttctggtcttactgcacagtcttttaagagaaatacttccattatgccacattgtccttgatccgtaagtgatgtgttaaggtgcttcaaaggaactctgacctctgaagtacttgagctactttagtatgtccagcctattgctttttgttttagtgtgtcaccataaatatcaggggcataaaaggctatctattcttaattcaaggataaaacagaagaagcttgtggtataaaacaatagttcaagatccag

SEQ ID NO: 695 - DNA, 609 bp, Homo sapiens
  misc_feature 29, 96, 165, 236, 248, 312, 314, 334, 352, 359, 413, 414,472, 525, 547, 583, 609: n = A,T,C or G
ctgagcttccatttgtcagctagcactgnggtagtcaaccatgcgaatgaggctattttggacctcatgattgtccagtgcctgggctgataccgngggaaacgaaattttgtggctgcccacaaaatcatggaaaataatgattttttagaaaacctccactgntttgttgtgcagcaataaataactgaaacaccaatccaaaaaacttataaagctataacaattaaaacagnataataatagtnccgggatacaaaaatggtcaaattgaagaggatacaaagcctcaaagcagtcctcactcataananccttgttgtatcactaaaanggcattaaaattgagaanaaggaanaactagtggattaattaataaatgagaagtatccataaggaaaaattaaaattnnattcttgcttcacattatgaaaaaatacaaacaacagattgattaaagacttaaatgngatcaacaaaatgttaaaactgtgataagaacatttaagaaaatagttctatnaccctgggataaaacattttcntccaaggcattaaagtgttaaatgaaaagactgatncatttattcattagaatttaaattcn

SEQ ID NO: 696 - DNA, 300 bp, Homo sapiens
ctgcaaaataagcgtgctaaattaaattgtcttaaggtttttccacttcattttgtgactttgtgtggttcgaatttctcagtattttaaccagtgtgttgatgttaaagtcaaaggctgcagtatgtctatattcttgctgtactcattggtagtttcagtatatgtaatgtgagtttaaatagtgaaattgtatctcatattaacatttcaaatgctcatattgaaaatggaaaatagtaaacacgggaattgattttattctggttgtctataatacttcattttaaatgtaaatgg

SEQ ID NO: 697 - DNA, 391 bp, Homo sapiens
  misc_feature 1, 2, 10, 16, 23, 315, 350: n = A,T,C or G
nngtcatgtntgatgnatctgancaggttgctccacaggtagctctaggagggctggcaacttagaggtggggagcagagaattctcttatccaacatcaacatcttggtcagatttgaactcttcaatctcttgcactcaaagcttgttaagatagttaagcgtgcataagttaacttccaatttacatactctgcttagaatttgggggaaaatttagaaatataattgacaggattattggaaatttgttataatgaatgaaacattttgtcatataagattcatatttacttcttatacatttgataaagnaaggcatggttgtggttaatctggtttatttttgntccacaagttaaataaatcataaaacttgaacaaaaaaaaa

SEQ ID NO: 698 - DNA, 536 bp, Homo sapiens
  misc_feature 508, 523: n = A,T,C or G
ctgagcatacagcaataaaaataacataatttttatgtgtacaatatttatggaatacgttactggaacagataaataatttagttaataacatgacaaagaacagaaattgtatacactatacagcatagtaatagaataatgaatgattaaagttattaatattaggtagaaaatgaagggtatctttgagagcagaactcaaggaagcaagcaatttgccttatgaggaaagagttacctgtggataaaggagaaactgaaaaatttacaagtcaagactttttgagcaaagacaaaaatatgactatgagtcaccaattcagtacagtgaaaaaaaagttgaagagatatcttggaagtaaaccatgttgtggaagagcagggttttgataatcatgggattattctgaatgaattttaaatgcgataggaatatatgagataatttcaccagagaataatatgatcatgtttgcatttcaaaggggtgtatctggtgcactgngtagaataaataggntatgtgagcaagt

SEQ ID NO: 699 - DNA, 419 bp, Homo sapiens
  misc_feature 1: n = A,T,C or G
ngtccacctgagggcaggtgacaaggacctgacagagcccatgcagggctttagatttggacacacaagagttgataacttcctcatgaactccttgcctgatctaaactcatattatgggttctgactgtttgagtaatcatcttcaaggttaaacctcttggcagttacccttttcacaaagtgcacagtgggaatcgagaatcgatagggttaattttggagcagtggcttataccattcacctctgtttttttgtgattatttcacagataatgagaccttaataacaaataggcgtaaaaaaattttcacattgaaatgatagaaacatttgatgtaataaaacttggttggcttgatattttaaggaattgaaacctagcaatcttattggagagacaagaattggtctccag

SEQ ID NO: 700 - DNA, 336 bp, Homo sapiens
ccacttattgtccttaaaaatccatactgatacatggacagtaagtgtgttttcagatggagtaccagcaccgaaaatgggttgagggaggatgggttgtatgtatgtttctgcccactaattttgagcagccatattatgaattaaatcgtcacagccaagtaataacccaagaatggtatgagtttcatgtgtaatagctcaaatggaataagcatgaatgctggagtggaccattatcctcaaatattctatgtcacttctcatttaaagactcttgttatgaactattagaaactttaggcaaaatcaaaagtatttgcggcaaaataaagg

SEQ ID NO: 701 - DNA, 418 bp, Homo sapiens
ccatgtgatgatgttgacaacccctgaagagcctcagtccattgttccacgtttaagaactaggaataccaggactgatgcaattctactgggtcactatcgcttgtcacaagacacagacaatcagaccaaagtatttgctgtaataactaagaaaaaagaagaaaaaccacttgactataaatacagatattttcgtcgtgtccctgtacaagaagcagatcagagttttcatgtggggctacagctatgttccagtggtcaccagaggttcaacaaactcatctggatacatcattcttgtcacattacttacaaatcaactggtgagactgcagtcagtgcttttgagattgacaagatgtacacccccttgttcttcgccagagtaaggagctacacagctttctcagaaagg

SEQ ID NO: 702 - DNA, 261 bp, Homo sapiens
  misc_feature 104, 178, 184, 240: n = A,T,C or G
gggcctgttgtgggggtgggggaagcagggaggggaacagctaaataggttgctgttgatttggttaaaaaatagtagggggatgatgctaataattaggctgngggtggttgtgttgattcaaattatgtgttttttggagagtcatgtcagtggtagaaatataattgttgggacnattagntttagcattggagtaggtttaggttatgtacgtagtctaggccatatgtgttgganattgagactagtagggctagg

SEQ ID NO: 703 - DNA, 261 bp, Homo sapiens
  misc_feature 40, 104, 178, 184, 220, 246: n = A,T,C or G
gggcctgttgtgggggtgggggaagcagggaggggaacanctaaataggttgctgttgatttggttaaaaaatagtagggggatgatgctaataattaggctgngggtggttgtgttgattcaaattatgtgttttttggagagtcatgtcagtggtagtaatataattgttgggacnattagntttagcattggagtaggtttaggttatgtacgtagnctaggccatatgtgttggagattganactagtagggctagg

SEQ ID NO: 704 - DNA, 381 bp, Homo sapiens
  misc_feature 1, 4: n = A,T,C or G
ngtntgaattctattaaagatacaaagaggagctggtaccatttcttctgaaactattacaaacaactgaaaaggtggaatttctccctaattcattttaggaggccagcattatactgataccaaaacctggcagaggtacaataataaaaggaaacttcaagtcagtatcactgatgaacaccaatgtgaaaatcctcaataaaatactggcaaactgaattcagcagcacatcaaaaagctaatccaccacaatcaagtcagcttcatccctgcgatgcaagtctggttcaacatatgcaaatcaataaatacaattcatcagataaacagagctaaagacaaaattcacatgattttctcaatagatgcagaaaagg

SEQ ID NO: 705 - DNA, 477 bp, Homo sapiens
ctgaaccctcgtggagccattcatacaggtccctaattaaggaacaagtgattatgctacctttgcacggttagggtaccgcggccgttaaacatgtgtcactgggcaggcggtgcctctaatactggtgatgctagaggtgatgtttttggtaaacaggcggggtaagatttgccgagttccttttactttttttaacctttccttatgagcatgcctgtgttgggttgacagtgagggtaataatgacttgttggtgattgtagatattgggctgttaattgtcagttcagtgttttaatctgacgcaggcttatgcggaggagaatgttttcatgttacttatactaacattagttcttctatagggtgatagattggtccaattgggtgtgaggagttcagttatatgtttgggattttttaggtagtgggtgttgagcttgaacgctttcttaattggtggctgcttttagg

SEQ ID NO: 706 - DNA, 266 bp, Homo sapiens
  misc_feature 100, 115, 157: n = A,T,C or G
ccatggctaggtttatagatagttgggtggttggtgtaaatgagtgaggcaggagtccgaggaggttagttgtggcaataaaaatgattaaggatactantataagagatcaggntcgtcctttagtgttgtgtatggctatcatttgttttgaggntagtttgattagtcattgttgggtggtaattagtcggttgttgatgagatatttggaggtggggatcaatagagggggaaatagaatgatcagtactgcggcgggtagg

SEQ ID NO: 707 - DNA, 358 bp, Homo sapiens
  misc_feature 131: n = A,T,C or G
ccatcagagaaatgcaaatcaaaaccacaatgagataccatctcacaccagttagaatggcaatcattaaaaagtcaggaaacaacaggtgctggagaggatgtggagaaataggaacacttttacaccgntggtgggactgtaaactagttcaaccattgtggaagtcagtgtggcgattcctcaaggatctagaactagaaataccatttgacccagccggccaatattcaacattcttaaaggaaagaattttcaacccagaatttcatatccagccaaactaagcttcgttagtgaaggagaaataaaatactttacagacaagcaaatactgagagattttgtcaccaccagg

SEQ ID NO: 708 - DNA, 491 bp, Homo sapiens
  misc_feature 12, 479: n = A,T,C or G
cctactatgggngttaaattttttactctctctacaaggttttttcctagtgtccaaagagctgttcctctttggactaacagttaaatttacaaggggatttagagggttctgtgggcaaatttaaagttgaactaagattctatcttggacaaccagctatcaccaggctcggtaggtttgtcgcctctacctataaatcttcccactattttgctacatagacgggtgtgctcttttagctgttcttaggtagctcgtctggtttcgggggtcttagctttggctctccttgcaaagttatttctagttaattcattatgcagaaggtataggggttagtccttgctatattatgcttggttataatttttcatctttcccttgcggtactatatctattgcgccaggtttcaatttctatcgcctatactttatttgggtaaatggtttggctaaggttgtctggtagtaagggnggagtgggtttg

SEQ ID NO: 709 - DNA, 460 bp, Homo sapiens
  misc_feature 1, 197, 216, 231, 313, 389, 411: n = A,T,C or G
nggttttttttgtagagcaaataatttatgcaaaatatgttacaaaatctgggatgctaaatagttgacacaagtactgtgtttgacatttagtttcatttgaattagtaatagaatttgctccttccaacatttacatcttttttctttctgactttatatattttcaataaaaatttgctccacagtttttaagntcattcttcttgaatccgnttttacatttgctgngacaaacctgcataaaactagattttatagatataacttctttggaagagataaaaattcaaaagtttgacattgctttcanttattcttttcttcattgttttgattggcccctgttagattgatgtattgccaatctacttttgatggcatgaatntaaaatgacaacataaaaagcncttctagtgcaacagtaattgaaacttgcagttttccattaaaaaaaaa

SEQ ID NO: 710 - DNA, 542 bp, Homo sapiens
  misc_feature 275, 507: n = A,T,C or G
ctgttacagtgacaagagataaaaagatagacctgcagaaaaaacaaactcaaagaaatgtgttcagatgtaatgtaattggagtgaaaaactgtgggaaaagtggagttcttcaggctcttcttggaagaaacttaatgaggcagaagaaaattcgtgaagatcatagatcctactatgcgattaacactgtttatgtatatggacaagagaaatacttgttgttgcatgatatctcagaatcggaatttctaactgaagctgaaatcatttgngatgttgtatgcctggtatataatgtcagcaatcccaaatcctttgaatactgtgccaggatttttaagcaacactttatggacagcagaataccttgcttaatcgtagctgcaaagtcagacctgcatgaagttaaacaagaatacagtatttcacctactgatttctgcaggaaacacaaaatgcctccaccacaagccttcacttgcaatactgctgatgcccccagtnaggatatctttgttaaattgacaacaatggacctg

SEQ ID NO: 711 - DNA, 394 bp, Homo sapiens
  misc_feature 184, 299: n = A,T,C or G
caaacccactccaccttactaccagacaaccttagccaaaccatttacccaaataaagtataggcgatagaaattgaaacctggcgcaatagatatagtaccgcaagggaaagatgaaaaattataaccaagcataatatagcaaggactaacccctataccttctgcataatgaattaactanaaataactttgcaaggagagccaaagctaagacccccgaaaccagacgagctacctaagaacagctaaaagagcacacccgtctatgtagcaaaatagtgggaagatttataggnagaggcgacaaacctaccgagcctggtgatagctggttgtccaagatagaatcttagttcaactttaaatttgcccacagaaccctctaaatccc

SEQ ID NO: 712 - DNA, 552 bp, Homo sapiens
  misc_feature 11, 133, 329, 345, 421, 518: n = A,T,C or G
gaggtctgtanaatgccaggctcaaatttgtctttataatttaataccagaaatctttcccttgtgatgtttctttctttctggattgcctctatagcaggggatagcgggggaggataaggcacatctttgntgtactgagaaatttgaccacgcaggatgatgtggctgttctcattcatctgcacagagaaaaataatgataaaatatccctttcctatgtttactgattttatggctgccataatggaagcctccttgactatttaatcctttctgtcaactaggttcgattttttttttaatttacctgttagaggtatttaanaattttaactagctanaaataattacattccaaaggaacaccaaggcaaataaatggttggtaatcagcaaaagaattacattagttgttgntgctacttattagggggagaactgtttttttttaaatttaaacaatttaataatctcaactgcaaataattttagatgcagcaaaggactatgtagncgttaatacctcatgttgatattttcataatatt

SEQ ID NO: 713 - DNA, 518 bp, Homo sapiens
  misc_feature 133, 148, 188, 209, 246, 248, 263, 306, 316, 339, 371, 430,469: n = A,T,C or G
ccaaaaactggaagcagctcactaaacaaacagtggcatacccatagaactgcatacttctcagcagtatgaaagaatgagctacttatataagcatcattgataaacctcaaaaaaaaaatgccacatgaanaaacccaaagggganaaacataaaaactttatatgtcagtcatataaaattctanaaaatgcaaactaatccatcntaaaggaaagtaaatcaacagttgtctggaggaccananagagcaggaggaganagattattaaaggggttaaagtaaatttgggagtgcccttccntttttaaatnctatgaaaatgaaagtaaaggcncatgcatgttgtaaactaatagtaacaaacanaatgggttggagtggggtgttgtctggggacatcattacaaaatgtaagccagtttatntaaattttgaaaagaccgtggactctgatctgactgatnaatgttggaagagataagtgtgctgcaaatgggggaattaataaaacag

SEQ ID NO: 714 - DNA, 281 bp, Homo sapiens
ccaattgatttgatggtaagggagggatcgttgacctcgtctgttatgtaaaggatgcgtagggatgggagggcgatgaggactaggatgatggcgggcaggatagttcagacggtttctatttcctgagcgtctgagatgttagtattagttagttttgttgtgagtgttaggaaaagggcatacaggactaggaagcagataaggaaaatgactatgagggcgtgatcatgaaaggtgataagctcttctatgataggggaagtagcgtcttgtagacc

SEQ ID NO: 715 - DNA, 443 bp, Homo sapiens
cttgaaatcagcaacacacttacaaatgagaaaatgaaaatagaagagtatataaagaaagggaaagaggattatgaagagagtcatcagagagctgtggctgcagaggtatccgtacttgaaaactggaaggagagtgaagtgtataagctacagatcatggagtcacaagcagaagcctttctgaagaagctggggctgattagccgtgatcctgcagcatatcccgacatggagtctgatatacgttcatgggaattgtttctttctaatgttacaaaagaaattgagaaagcaaagtctcagtttgaagaacaaattaaggcaattaaaaatggttcccggctcagtgaactttctaaagtgcagatttctgagctttcatttcctgcctgtaacacggttcatcccgagttactccctgagtcttcaggccacgatgg

SEQ ID NO: 716 - DNA, 639 bp, Homo sapiens
  misc_feature 6, 516, 532, 553, 602, 617, 620: n = A,T,C or G
ccaaanaaaatgaagtacagagtctgcatagtaagcttacagataccttggtatcaaaacaacagttggagcaaagactaatgcagttaatggaatcagagcagaaaagggtgaacaaagaagagtctctacaaatgcaggttcaggatattttggagcagaatgaggctttgaaagctcaaattcagcagttccattcccagatagcagcccagacctccgcttcagttctagcagaagaattacataaagtgattgcagaaaaggataagcagataaaacagactgaagattctttagcaagtgaacgtgatcgtttaacaagtaaagaagaggaacttaaggatatacagaatatgaatttcttattaaaagctgaagtgcagaaattacaggccctggcaaatgagcaggctgctgctgcacatgaattggagaagatgcaacaaagtgtttatgttaaagatgataaaataagattgctggaagagcaactacaacatgaaatttcaaacnaaatggaagaatttangattctaaatgaccaaaacanagcattaaaatcagaagttcagaagctgcagactcttgtttctgcacangcctaataaggatgntgnggaacaaatggaaaaattg

SEQ ID NO: 717 - DNA, 473 bp, Homo sapiens
  misc_feature 1, 2, 102, 148, 157, 187, 290: n = A,T,C or G
nntgaggctactgctgttttattacaacattacctcttgtttttataaagtgtaccaagatttaaattgataactttattttacttgaaaaaaaaaagtttnttttatcaccagtgttacagttgtcttctgtttctttttgttttgntttatttgntttcctttttagccaaagagtgaacagaanattttcttattttggtggctattcattttacttttaaaagtgattggtggattttagactaattatgggggaatttgccaccaaaataaaaaatatgtaaagngtagtgattacagagtggttaaaatgtgggttagtacttatttattccattaattgattatttgactgtttataaagaaagttgctttatttctttaaacatcttcaaaagatgatcctttcttgtcacattatagccaaaagaagcagagaacttcactgtctgcatttggttcctggttgg

SEQ ID NO: 718 - DNA, 207 bp, Homo sapiens
ggtaaatgctagtataatatttaccatctcacttctaggaatactagtatatcgctcacacctcatatcctccctactatgcctagaaggaataatactatcactgttcattatagctactctcataaccctcaacacccactccctcttagccaatattgtgcctattgccatactagtctttgccgcctgcgaagcagcggtagg

SEQ ID NO: 719 - DNA, 255 bp, Homo sapiens
  misc_feature 214: n = A,T,C or G
cctatattacggatcatttctctactcagaaacctgaaacatcggcattatcctcctgcttgcaactatagcaacagccttcataggctatgtcctcccgtgaggccaaatatcattctgaggggccacagtaattacaaacttactatccgccatcccatacattgggacagacctagttcaatgaatctgaggaggctactcagtagacagncccaccctcacacgattctttacctttcacttcatcttgcc

SEQ ID NO: 720 - DNA, 455 bp, Homo sapiens
  misc_feature 154, 346, 349, 366, 444: n = A,T,C or G
ccaatgtcgaaacctacaagatttccttaaaatctctaatagaggcattacttgctttcaattgacaaatgatgccctctgactagtagatttctatgatccttttttgtcattttatgaatatcattgattttataattggtgctatttgaanaaaaaaatgtacatttattcatagatagataagtatcaggtctgaccccagtggaaaacaaagccaaacaaaactgaaccacaaaaaaaaaggctggtgttcaccaaaaccaaacttgttcatttagataatttgaaaaagctccatagaaaaggcgtgcagtactaagggaacaatccatgtgattaatgnttncattatgttcatgtaanaagccccttatttttagccataattttgcatactgaaaatccaataatcagaaaagtaattttgccacattatttatnaaaaatgttcc

SEQ ID NO: 721 - DNA, 530 bp, Homo sapiens
  misc_feature 134, 390: n = A,T,C or G
ccagtgcttgctgccgtggtttagtgattgggtgttagaaataaaaactcaggtctatttcttaccagtcagtaacaatttttagagaatgtacttggtatataatatatggacttcaggaactttattggggnggggggttaattttgccttaccctgttcactttcagatgattaggcttttgcactttagaatgagaaacttgtgacgttagtgtgttcttactagctttaatttgtatgtagcaatgaattgtgaatcttagtgcagtgggtttttttaaaaaactcaaaaagctgggaattaagtggtttcagtaataatgctataccgaggtgcttgcattgtatttcataattttgttacaaaccaaaattatttttaatganaacggtcttgggttcagaggtgtgatgccagaatgtattttcgtactgttaggcccttggaacagataccggtgctttcttgaaagatgaaagaaatgcaatgggtgctcttcatgcaaggttgcaaacctaccaagaat

SEQ ID NO: 722 - DNA, 242 bp, Homo sapiens
  misc_feature 29, 35, 55, 192: n = A,T,C or G
ccaagggtcatgatggcaggagtaatcanaggtgntcttgtgttgtgataagggnggagaggttaaaggagccacttattagtaatgttgatagtagaatgatggctagggtgacttcatatgagattgtttgggctactgctcgcagtgcgccgatcagggcgtagtttgagtttgatgctcatcctgatnagaggattgagtaaacggctaggctagaggtggctagaataaataggagg

SEQ ID NO: 723 - DNA, 472 bp, Homo sapiens
  misc_feature 191, 266, 460: n = A,T,C or G
cctactatgggtgttaaattttttactctctctacaaggttttttcctagtgtccaaagagccgttcctctttggactaacagttaaatttacaaggggatttagagggttctgtgggcaaatttaaagttgaactaagattctatcttggacaaccagctatcaccaggctcggtaggtttgtcgcctcnacctataaatcttcccactattttgctacatagacgggtgtgctcttttagctgttcttaggtagctcgtctggnttcgggggtcttagctttggctctccttgcaaagttatttctagttaattcattatgcagaaggtataggggttagtccttgctatattatgcttggttataatttttcatctttcccttgcggtactatatctattgcgccaggtttcaatttctatcgcctatactttatttgggtaaatggtttggctaangttgtctggtag

SEQ ID NO: 724 - DNA, 292 bp, Homo sapiens
  misc_feature 1, 26, 73, 177, 215, 256, 274, 276: n = A,T,C or G
nccaccactgcagccctacatacagntgaaaaaaaattccattctgttaacatttgttttataagttttcacncaatacacaaaaaacccctctgcacttcttgtaaagaacaaaaaagatacacaacagttaagcgtaaagatcacaggcaatagcattcaaacatggatgtgggnagagaaaggagtacctggcatgagtacctgcttagttngactgaatccttgatttttaatttggcttttcatgggccgntcacaacaccaacgctgngngaggtatggtagtcag

SEQ ID NO: 725 - DNA, 122 bp, Homo sapiens
  misc_feature 35, 61, 86, 88, 91, 114: n = A,T,C or G
atagaaagggcatacccaaaatgttactgaaaatntaatacaaattccaagattcaccaangaagtaacaaaaacctggcctgcangnggncccctatcccgtggctccatggntgatgtgg

SEQ ID NO: 726 - DNA, 477 bp, Homo sapiens
  misc_feature 266: n = A,T,C or G
ctgaaccctcgtggagccattcatacaggtccctaattaaggaacaagtgattatgctacctttgcacggttagggtaccgcggccgttaaacatgtgtcactgggcaggcggtgcctctaatactggtgatgctagaggtgatgtttttggtaaacaggcggggtaagatttgccgagttccttttactttttttaacctttccttatgagcatgcctgtgttgggttgacagtgagggtaataatgacttgttggtgattgtanatattgggctgttaattgtcagttcagtgttttaatctgacgcaggcttatgcggaggagaatgttttcatgttacttatactaacattagttcttctatagggtgatagattggtccaattgggtgtgaggagttcagttatatgtttgggattttttaggtagtgggtgttgagcttgaacgctttcttaattggcggctgcttttagg

SEQ ID NO: 727 - DNA, 416 bp, Homo sapiens
cctgtctttgaatggatgaaataggttaataaaaaacatcactgtttaaaaactagaacactgaaaaattctaggaaagcttattttcccttatatttttatggtactttcaacacttaataacactatttcaattaagttttctcctagagtttatagtatatcagtacattcttttctgtggatgcaataatatagaatcttattccaaatcttactggcaggttctcttaaattcttcaacggctgccatagtgattaaccaaaattagttatgatttctgcctatctgtgtgagaacttacaggggaaattgttctaaacctgaggaacatgaagtaactgtactgcacactccaaatgatgacagtcattttatatcaccttcaattacccaacagcttttaatagtctgg

SEQ ID NO: 728 - DNA, 416 bp, Homo sapiens
  misc_feature 411: n = A,T,C or G
cctgtctttgaatggatgaaataggttaataaaaaacatcactgtttaaaaactagaacactgaaaaattctaggaaagcttattttcccttatatttttatggtactttcaacacttaataacactatttcaattaagttttctcctagagtttatagtatatcagtacattcttttctgtggatgcaataatatagaatcttattccaaatcttactggcaggttctcttaaattcttcaacggctgccatagtgattaaccaaaattagttatgatttctgcctatctgtgtgagaacttacaggggaaattgttctaaacctgaggaacatgaagtaactgtactgcacactccaaatgatgacagtcattttatatcaccttcaattacccaacagcttttaatantctgg

SEQ ID NO: 729 - DNA, 564 bp, Homo sapiens
  misc_feature 399, 439, 463: n = A,T,C or G
ctgtgagtagaggagtcttcccgagagtagcagttgttgatccaaatgattgaagccttcaggtaagggaataactgctgcaggaattctttcttgaagaatttaagctgtttggtaagaattctgtaactacatacctttgaaacactattcacattcaaataaacgcttgttttctagccaggcacaggctcaattagtttttcaaactctagccaaggcagtatttcatttgggaaatcatgcaacagaactgctcaattcttaacttctcctgctgttaacatttacacttagactgccagcaacagttaacttaaattttggtctcaagggaacaaaaaaaaattgcattcagaatttaatatagtattttaaaactaattttagcctgtaagncattatgagcaatagtaacttttatacctcctcatcttgnctgataatatattctatatgctgncaatctgattatatagtctatatgctagaagttgctgattttcattctgccaccaaaaaaaactgtccttttttttttatgggggaaaaagggaatttaaa

SEQ ID NO: 730 - DNA, 310 bp, Homo sapiens
ccatttttatttcttcttcagagaagtgtttatttaggtctgttgcccattttacaattaggccatatgttttcttgctgttgagttgtatgtgtgtttgtataaattttgcatattaaccccttatcacacgtatgttttttaaaataaattttgcttattaatcttttatcagatgtatggtttccaaatatattcttccgatccatggattctcttttttgttatgattgtttctttgctcttcggaagctttttgttttgttttgttatttgttttactttgatatagtcccatttattgtttttg

SEQ ID NO: 731 - DNA, 467 bp, Homo sapiens
  misc_feature 1, 260, 276, 334, 388, 392, 407: n = A,T,C or G
ngacaaccttagccaaaccatttacccaaataaagtataggcgatagaaattgaaacctggcgcaatagatatagtaccgcaagggaaagatgaaaaattataaccaagcataataaagcaaggactaacccctataccttctgcataatgaattaactagaaataactttgcaaggagagccaaagctaagacccccgaaaccagacgagctacctaagaacagctaaaagagcacacccgtctatgtagcaaaatagngggaagatttataggnagaggcgacaaacctaccgagcctggtgatagctggttgtccaagatagaatcttagntcaactttaaatttgcccacagaaccctctaaatccccttgtaaatttaactgntagnccaaagaggaacagntctttggacactaggaaaaaaccttgtagagagagtaaaaaatttaacacccatagtagg

SEQ ID NO: 732 - DNA, 492 bp, Homo sapiens
  misc_feature 266, 343, 364, 483: n = A,T,C or G
cctactatgggtgttaaattttttactctctctacaaggttttttcctagtgtccaaagagctgttcctctttggactaacagctaaatttacaaggggatttagagggttctgtgggcaaatttaaagttgaactaagattctatcttggacaaccagctatcaccaggctcggtaggtttgtcgcctctacctataaatcttcccactattttgctacatagacgggtgtgctcttttagctgttcttaggtagctcgtctggnttcgggggtcttagctttggctctccttgcaaagttatttctagttaattcattatgcagaaggtataggggttagnccttgctatattatgcttggntataatttttcatctttcccttgcggtactatatctattgcgccaggtttcaatttctatcgcctatactttatttgggtaaatggtttggctaaggttgtctggtagtgaggcggagngggtttggg

SEQ ID NO: 733 - DNA, 562 bp, Homo sapiens
  misc_feature 1, 169, 400, 430, 460, 497, 513, 523, 555: n = A,T,C or G
ntgaaatggcaatagcattcactgtcgtattttgcagtgctcaggaagtgggacgttaactttgaaggtgcttgtttgtattagctctgctaggtttacctctacaacgtagatttcagcagctatgctgactgacactacattctagttcttaagattttttttccanatccccccttccccagctagacatacgtagcatactttcatcttattcagtctttctgtaacctgctgctgcttttagtcctcctcacctcagatcggaatcaatggagtgggcccagaggatacattttaattccagtaatggtaggtagatttgtcctgctttctaaaacatctcctcatttcatatttccactccatattgattccataagggaaaattaatgggtgnttcctcctttagggaggcaatgcaaagagngtggacatcttctaatcttgaggaacagtngttgatttcccttgaaggagcttacatattgactgtntttcacaataacctgnttgccccagntcaatccctcattttaatacttaatgttggtnctgggct

SEQ ID NO: 734 - DNA, 265 bp, Homo sapiens
  misc_feature 1: n = A,T,C or G
nggtccagaacaagagaaataactgcagaaaacacatatggttggaaaccatgcgcttgtgactttttctgtagcctatgggagtggacagagtgggtaacccaagatgtttttaagactgactggactaagaatggcgtacttatagccaactacttcccccctaatgtgactgaagggattcataatgatcacaattagcattacggttaagtattttagggttgacgtctaagctcacacttgaaaggtatttatctaatgg

SEQ ID NO: 735 - DNA, 216 bp, Homo sapiens
atttaatacgtgctcactgctcggcacgcgctgaagctacagttaacaatcagtgagcacatattaaatgataaaataatgctgatggtaaacattcataacagcagagtaagattttggcagttttgtgtctcggtaacataactgtaaccttagatgaacacctatcccttcatgatctgactttagaggcaaggagtttgtaacatctaatgg

SEQ ID NO: 736 - DNA, 285 bp, Homo sapiens
  misc_feature 13, 177: n = A,T,C or G
ctgaaaggcaacntggagactagttagtctagtcccctcatattataaattggtatgctgaggccaggcagtaaattgctatggagctctccaatttaaggccagtttgactccaagggtagggcttctagtaaaattttgtgattaaattggaaactctaatttatttttctatgngtttttggtacctaatcctcataagcaagccatatttcaaggctgatcaatgaaaacaccaaataccaaagcttcctttcccttccaaatttactgaccctttgtcag

SEQ ID NO: 737 - DNA, 509 bp, Homo sapiens
  misc_feature 4, 13, 303, 347, 419, 446, 473, 483, 489, 503: n = A,T,C or G
agangaagaagangaagattaagggaaaagtacatcggtcaagaagagctcaacaaaacaaagcccatctggaccagaaatcccgacgatattactaatgaggagtacggagaattctataagagcttgaccaatgactgggaagatcacttggcagtgaagcatttttcagttgaaggacagttggaattcagagcccttctatttgtcccacgacgtgctccttttgatctgtttgaaaacagaaagaaaaagaacaacatcaaattgtatgtacgcagagttttcatcatggataactgngaggagctaatccctgaatatctgaacttcattagaggggtggnagactcggaggatctccctctaaacatatcccgtgagatgttgcaacaaagcaaaattttgaaagttatcangaagaatttgggtcaaaaaatgcttanaactctttactgaactggcggaagatnaagagaactncaaganattctatgagcagntctctt

SEQ ID NO: 738 - DNA, 97 bp, Homo sapiens
cagtgaattgaatacgactcctatagggcgaattgggccctctagatgcatgctcgagcggccgccagtgtgatggatatctgcagaattcgccctt

SEQ ID NO: 739 - DNA, 209 bp, Homo sapiens
  misc_feature 4: n = A,T,C or G
ccgncagtgtgatggatatctgcagaattcgcccttagcggcccgcccgggcagggtccttatatatagtagcttagtttgaaaaaatgtgaaggactttcgtaacggaagtaattcaagatcaagagtaattaccaacttaatgtttttgcattggactttgagttaagattattttttaaatcctgaggactagcattaattgacgg

SEQ ID NO: 740 - DNA, 164 bp, Homo sapiens
ccaagctaatgggtgacactgtgaatgcaactctaatgcagcctggcgtaaatggtcctatgggcactaactttcaagttaacacaaacagaggaggtggtgtgtgggaatctggtgcagcaaactcccagagtacatcatggggaagtggaaatggcgcaaat

SEQ ID NO: 741 - DNA, 514 bp, Homo sapiens
  misc_feature 82, 438, 485, 497: n = A,T,C or G
ccagtcagaattgagatgtgctgtgagtgcaaaatacactcaaatctaagacttagtatggaagaaaaagaagataaggtgnttcattaataatcttttatattgattacatgttgaaatgatatttttaatatactgggttacataaactgttattaagattaattttgcttgtttcttttttaatatggctactagaaaattaaaaattatgttgtggttcacattatatttctgttgaacaatgtggacatagataatctacagtcattacattagccttagaatttagcatcatacttttaagcactctggggtactaacttgaactcccagaaacccataagcacactctgcatataaattattgcaaaattcattcttatctctctgaaagatatgcattttaagggtaaaaagaattcacaaaatattgantccttaacaaatgtcaattagtatatggagagagctaaaggacttcntgtagactggtncattggggaaaaacaga

SEQ ID NO: 742 - DNA, 439 bp, Homo sapiens
  misc_feature 28, 123, 144, 347, 367: n = A,T,C or G
gcaggtcctatgcatagttaataagggntataatctactcaacatggaaaatgggagcctatttgcaaacacacgagtaattaaagtaccaattctctcttagtttctttttttatagttggnttattttgcaattataaatgntaaacatccctagagatgaaagttaaaatggctgatcacagatcagtagcaaaatacaaattgacaattcaaaattataaataaaactctgttgaggatgtttaactttgagcctccaaatttaagagctaagcttggaagaaacaaatttataggttatatttccctcttaaattaaaaaacaaacttcctctggcagtagnttgtgaattcctttcattgnaatgataccatgattacaggatcaaaaatgcttaacttacttgccattctgctcacatcatcacagttgttt

SEQ ID NO: 743 - DNA, 275 bp, Homo sapiens
  misc_feature 3: n = A,T,C or G
cangacgctacttcccctatcatagaagagcttatcacctttcatgatcacgccctcatagtcattttccttatctgctccctagtcctgtatgcccttttcctaacactcacaacaaaactaactaatactaacatctcagacgctcaggaaatagaaaccgtctgaactatcctgcccgccatcatcctagtcctcatcgccctcccatccctacgcatcctttacataacagacgaggtcaacgatccctcccttaccatcaaatcaattgg

SEQ ID NO: 744 - DNA, 295 bp, Homo sapiens
  misc_feature 5: n = A,T,C or G
ctgtncttttaaaaaatctggatgttttttatttagtgattgttcgacaattagctgcttcaaaacataatgtgcattgcttatgaatgccttcatatactaatacagatactctgataatattacactctaataaggataatgctgaattttgaaaggacacaaaacatctaatgccaatatatacatgattagccaacatctttgctatcaagaccactcgtttttaaataaagatgcaagtgtcagttgtagattattgggatgaagctaaatccccagaatgcagcagcag

SEQ ID NO: 745 - DNA, 477 bp, Homo sapiens
  misc_feature 434: n = A,T,C or G
cgcgttactgtacatattgctagcaggagacaactggaaatactaaacaaatactggaattcacattacagacagacgaaaccaacatggatgccacacataacttcctttgtagtttcacagagagcctatttgtggttgctcaggtggggtcatacattgcttgcagaaatggcctgatcatagctctatgaaacaatgaattcggaatgaaatcttaccatgacacctctctgtaggaaagaaatgttgcttcacgtgtgctaagttgagataataatatttcacatatttatatacagagaatcactctcaaatttaacccaagataagcaataggatttgggggtgacttgtacacatttctaacaacacttttcttttttctagaggtcactctcaaacactgatatatcactatagtttgagtgtanggattcagtaatcaaaggttgttattgcaaaagagccaggcag

SEQ ID NO: 746 - DNA, 524 bp, Homo sapiens
  misc_feature 393: n = A,T,C or G
ctgtgaaattgggttgggagagccaaaatactttacaacttcagaccggagaaaaggccagaggtgtgaagttagactctatgatgaaacagagtcgtcttttgcgatgacatgttgggataatgaatccattctacttgcacagagctggatgccacgagaaacagtaatatttgcctcagatgtaagaataaattttgacaaatttcggaactgcatgacagcaactgtaatctcaaaaaccattattacaactaatccagatataccagaagctaacattctgctgaattttatacgagaaaataaagaaacaaatgttctggatgatgaaattgacagttatttcaaagaatccataaatttaagtacaatagttgatgtctacacagntgaacaattaaagggaaaagctttgaagaatgaaggaaaagctgatccttcctatggcatcctttatgcctacatttccacactcaacattgatgatgaaactcaaaagtagttcgaaatagatgttccag

SEQ ID NO: 747 - DNA, 456 bp, Homo sapiens
  misc_feature 411: n = A,T,C or G
cctcagttcttgattgtggttgacggggcgtcaccatgaaggagcccatttagtataaagcttccaaccttttctcttaatcgtttctttaatcttttaaaccatcttcaagtgcataggggagtttccgatgccagaggatgaaagcaagtgctttctccaccctctcctcccagagtgaaaacaaatccttttgctgatacttgtttcaaaagcatccattgtaaagcttctcagtgacacaaaatactgagaggtaactttttatcaatcaaaccacataccccaatttaacacctttcagtgctctgaattcaactgacagactaaagggtgtttcctgtaacagtctgaaatattaagtgttttttttgttttgtttttaaatcttatttcagaaaacttcctctnggggtaggaaagtacacatgaagcagcaaagtaacgaagaaaaac

SEQ ID NO: 748 - DNA, 474 bp, Homo sapiens
  misc_feature 4, 28, 58, 207, 210, 217, 423: n = A,T,C or G
ccanaccagggaaccaaatgcagacagngaagttctctgcttcttttggctataatgngacaagaaagggatcatcttttgaagatgtttaaagaaataaagcaactttctttataaacagtcaaataatcaattaatggaataaataagtactaacccacattttaaccactctgtaatcactacactttacatattttttatttnggnggcaaantcccccataattagtctaaaatccaccaatcacttttaaaagtaaaatgaatagccaccaaaataagaaaatcttctgttcactctttggctaaaaaggaaaacaaataaaacaaaacaaaaagaaacagaagacaactgtaacactggtgataaaagaaactttttttttacaagtaaaataaagttatcaatttaaatcttggncactttataaaaacaagaggtaatgttgtaataaaacagcagtagcctcag

SEQ ID NO: 749 - DNA, 355 bp, Homo sapiens
  misc_feature 8, 9, 12, 22, 242, 311, 332, 348: n = A,T,C or G
cctgggtnnagnggctgactgnaacctccacttcctgttctcaggcaatcctcctgcctcagcctccttagtagctgggactacaggagtgtgcaaccatgcccaactaatttttgtatttttaatagagacagggtttcaccatgttgatcaggttggtctccaactcctgacctcaggtgatccacctgtcccagcctcccaaagtgctgggattacaggcatgagccaccacgcccggnccaggataaagtaaaaatttgtaagcacacaaggccctttgcaacctggctcctggttactactttaancctcctgccctcccaaatgtnctcactgtttttctanacatacc

SEQ ID NO: 750 - DNA, 493 bp, Homo sapiens
  misc_feature 350, 364, 454: n = A,T,C or G
ccatgctggtctcgaactcctgaactcaggtgatccacccgcctcagtctcccaatagattacatatattattaatgaattgcttcctttaacaccctattcattgaattttccagtaaaccacaattactaattactcctgaaatcagaaaagaggttaaaaagattttataacagtatcctatgaaatctactactttcaagtaatagtagttgaattaccaaaacccgtcactcaagccaatgactacaattaagatatgagtaacatttcctagataaataaagtcaattaattatatttgcatctgggaaatagagaaagtacatataagccatgattttgaagncaaaagagagagantatttgccaaggaggggtgagttatagtatgtaattataacatacagaagctttttgtatgctggtaactaattttaatttcctacattnttatggagatttctgctattcttgtcctattttccacct

SEQ ID NO: 751 - DNA, 364 bp, Homo sapiens
  misc_feature 11, 34, 211, 360, 362: n = A,T,C or G
cgaggtctggnaaggtcaccaagtctgcccaganagctcagaaggctaaatgaatattatccctaatacctgccaccccactcttaatcagtggtggaagaacggtctcagaactgtttgtttcaattggccatttaagtttagtagtaaaagactggttaatgataacaatgcatcgtaaaaccttcagaaggaaaggagaatgttttgnggaccactttggttttcttttttgcgtgtggcagttttaagttattagtttttaaaatcagtactttttaatggaaacaacttgaccaaaaatttgtcacagaattttgagacccattaaaaaagttaaatgagataaaaaaaaaaaancntg

SEQ ID NO: 752 - DNA, 498 bp, Homo sapiens
  misc_feature 17, 368, 395, 400, 425: n = A,T,C or G
ctggattatgggttggnattggtcatatgttagactccatacaggcatagctatgatgcagtgaatcccttagaagttacaattctcaaattacatacttcctcagatgtaacattagaactcaatatttctaacaataacataccagaaaaggctggactggcactcatctgctgactaacttgtagcctcagtaatatgacatacttgcctttaacaaattatctcaaattaactaacagaccttcagaaaatggagattctttttgatggggacataatcaaatttaagtctgagaaatatgcttaacagttggaactcaaattaaatgtactgattttaaagtttagacattaacaagtgatanattagcctcaaaaaaagacaatttggnaaggnttaggtcttttaatttggtgcttgntcacaacttgactggtgcttctttccttgctgcttcacatcaagcatggggccaattctattttcagtaaatg

SEQ ID NO: 753 - DNA, 467 bp, Homo sapiens
  misc_feature 1, 15, 77, 314, 317, 335, 419: n = A,T,C or G
nacaaccttagccanaaccatttacccaaataaagggataggcgatagaaattgaaacctggcgcaatagatatagnaccgcaagggaaagatgaaaaattataaccaagcataatatagcaaggactaacccctataccttctgcataatgaattaactagaaataactttgcaaggagagccaaagctaagacccccgaaaccagacgagctatctaagaacagctaaaagagcacacccgtctatgtagcaaaatagtgggaagatttataggtagaggcgacaaacctaccgagcctggtgatagctggntgnccaagatagaatcttagntcaactttaaatttgcccacagaaccctctaaatccccttgtaaatttaactgttagtccaaagaggaacagctcttggacacnaggaaaaaaccttgcagagagagtaaaaaatttaacacccatagtagg

SEQ ID NO: 754 - DNA, 196 bp, Homo sapiens
  misc_feature 17: n = A,T,C or G
gtcatgttcaagtgttntaatctgacgcaggcttatgcggaggagaatgttttcatgttacttatactaacattagttcttctatagggtgatagattggtccaattgggtgtgaggagttcagttatatgtttgggattttttaggcagtgggtgttgagcttgaacgctttcttaattggtggctgcttttagg

SEQ ID NO: 755 - DNA, 381 bp, Homo sapiens
ctggaaaggattctgtacatataagacatcaaatattgagggatactggaacttttaaattaatgggcaaagaaagtcaacaaaggaagttcatatgaaatcaaactagtaatatgattacaaaaaaaaagtttaaaatttttcttggccccagtcttatcatttctgagccaaatacaattctatcgaaatcacctgaaactgaaatcaccattctaggctggttttcccataaagatggactgctccaaaaagaggaatcaagaaagaatttggctcacagtgaattattcactttgtcttagttaactaaaaataaaatctgactgttaactacagaaatcatttcaaattctgtggtgataataaagtaatgaccgc

SEQ ID NO: 756 - DNA, 341 bp, Homo sapiens
  misc_feature 3: n = A,T,C or G
ggntataaacctattatttattgcagaactaataaaaaatccaaagccttgtatttgtacatctttattatctctaaagcactttcctcaacctaatttcagtttttacaattggtactcaagaaaatagagacagaaatcatttgattttgcccagaaaccatctgcttatatttataaggccacctaatttgaaatcacatatagaccaggcgcggtggctcacgcctgtaattccaacactttggaaggccaaggcaggtggatcacaaggtcaagagattgagaccatcttggccaacatggcgaaaccccgtctctaccaaaaatacaaaaatcag

SEQ ID NO: 757 - DNA, 479 bp, Homo sapiens
  misc_feature 4, 359, 425, 431: n = A,T,C or G
cgcnttactgtacatattgctagcagggagacaactggaaatactaaacaaatactggaattcacattacagacagacgaaaccaacatggatgccacacataacttcctttgtagtttcacagagagcctatttgtggttgctcaggtggggtcatacattgcttgcagaaatggcctgatcatagctctatgaaacaatgaattcggaatgaaatcttaccatgacacctctctgtaggaaagaaatgttgcttcacgtgtgctaagttgagataataatatttcacatatttatatacagagaatcactctcaaatttaacccaagataagcaataggatttgggggtgacttgtncacatttctaacaacacttttcttttttctagaggtcactctcaaacactgatatatcactatagnttgagngtagggattcaagtaatcaaaggttgttattgcaaaagagccaggcag

SEQ ID NO: 758 - DNA, 267 bp, Homo sapiens
  misc_feature 6: n = A,T,C or G
ccatgnctaggtttatagatagttgggtgggttggtgtaaatgagtgaggcaggagtccgaggaggttagttgtggcaataaaaatgattaaggatactagtataagagatcaggttcgtcctttagtgttgtgtatggctatcatttgttttgaggttagtttgactagtcattgttgggtggtaattagtcggttgttgatgagatatttggaggtggggatcaatagagggggaaatagaatgatcagtactgcggcgggtagg

SEQ ID NO: 759 - DNA, 449 bp, Homo sapiens
  misc_feature 371: n = A,T,C or G
cgaggtcttgaaatcagcaacacacttacaaatgagaaaatgaaaatagaagagtatataaagaaagggaaagaggattatgaagagagtcatcagagagctgtggctgcagaggtatccgtacttgaaaactggaaggagagtgaagtgtataagctacagatcatggagtcacaagcagaagcctttctgaagaagctggggctgattagccgtgatcctgcagcatatcccgacatggagtctgatatacgttcatgggaattgtttctttctaatgttacaaaagaaattgagaaagcaaagtctcagtttgaagaacaaattaaggcaattaaaaatggttcccggctcagtgaactttctaaagngcagatttctgagctttcatttcctgcctgtaacacggttcatcccgagttactccctgagtcttcaggccacgatgg

SEQ ID NO: 760 - DNA, 414 bp, Homo sapiens
  misc_feature 5, 34, 136, 169, 173, 209, 227, 246, 269, 274, 291, 316,341, 414: n = A,T,C or G
ccatnaactggaagcagctcactaaacaaacagnggcatacccatagaactgcatacttctcagcagtatgaaagaatgagctacttatataagcatcattgataaacctcaaaaaaaaaatgccacatgaagaancccaagggggagaaacataaaaactttatatgncagncatataaaattctagaaaatgcaaactaatccatcntaaaggaaagtaaatcancagttgtctggaggaccanagagagcaggaggagagagattnttaanggggttaaagtaaattngggagtgcccttccatttttaaatnctatgaaaatgaaagtaaaggcccntgcatgttgtaaactaatagtaacaaacagattgggttggagtggggtgttgtctggggacatcattacaaan

SEQ ID NO: 761 - DNA, 428 bp, Homo sapiens
gagcctcactaaaataacagatttcagtatagccaagttcatcagaaagactcaaatggaatgatttacaagatagaacactttaaaccaggtcagtcctatctttttgtagctgaaggctatcagtcataacacaatttcgcgtacacctctgctcattatggaattacacttaaaacgaatctcaagagggtgaccattgttgtttcagataccatccctaaggagagtggttaacaggaagattgccagtgttactgatggaaagaagtgtttgtttgttttttttcttgtcaaagacttacaccatagttttaaattaaactgtcaggcattttctcagacaggttttccttttcaatgcagtaatgaagaactaagataaaaatcatgacttttgactgccactcaacattattacatgcacc

SEQ ID NO: 762 - DNA, 574 bp, Homo sapiens
  misc_feature 47, 190, 449, 509, 510, 552: n = A,T,C or G
caggtctgaactgataagtattaagagacgtttgttgctagttaagngttccagttgagagttcgaagtgaaaacctgggctctttaccagtgttgagtgagaagatttatttctctttcctctgaatttaccacatgtaacatcacagagacatgtagagttcctttaggatttgcgatttgaaccagnccagtctgattttcaggtgaattctgtgaagagcttgatgggggaagtctgaagacagaaggaattagggaaaagggtgatacttacagagtaaaggaaataaatgaaaagataatggtatttttggtagccacagggaaatagcaggaggggactggagatcacacacacgcacacgcacacacacaaacacacacacacgctaaaactcaaactaaaaacctcccaaaggagctgctttgtttgcagacttcaattngaagtagatactaagggcaagaatagaccagttaaaattcacctgaaaatctcttcccanncttcaaatgtgctaaaatatcactgtcagcttagcatctctncatgtatgtatatatagatgta

SEQ ID NO: 763 - DNA, 465 bp, Homo sapiens
  misc_feature 41, 116, 411: n = A,T,C or G
cctactatgggtgttaaaattttttactctctctacaaggntttttcctagtgtccaaagagctgttcctctttggactaacagttaaatttacaaggggatttagagggttctgngggcaaatttaaagttgaactaagattctatcttggacaaccagctatcaccaggctcggtaggtttgtcgcctctacctataaatcttcccactattttgctacatagacgggtgtgctcttttagctgttcttaggtagctcgtctggtttcgggggtcttagctttggctctccttgcaaagttatttctagttaattcattatgcagaaggtataggggttagtccttgctatattatgcttggatataatttttcatctttcccttgcggtactatatctattgcgccangtttcaatttctatcgcctatactttatttgggtaaatggtttggctaaggttg

SEQ ID NO: 764 - DNA, 151 bp, Homo sapiens
ctgtcaattaatgctagtcctcaggatttaaaaaataatcttaactcaaagtccaatgcaaaaacattaagttggtaattactcttgatcttgaattacttccgttacgaaagtccttcacatttttcaaactaagctactatatttaagg

SEQ ID NO: 765 - DNA, 251 bp, Homo sapiens
gaagagcttatcacctttcatgatcacgccctcatagtcattttccttatctgcttcctagtcctgtatgcccttttcctaacactcacaacaaaactaactaatactaacatctcagacgctcaggaaatagtaaccgtctgaactatcctgcccgccatcatcctagtcctcatcgccctcccatccctacgcatcctttacataacagacgaggtcaacgatccctcccttaccatcaaatcaattgg

SEQ ID NO: 766 - DNA, 375 bp, Homo sapiens
  misc_feature 10: n = A,T,C or G
cgaggtctgncctcctggttcttcatccattattaacagaagagcatactggtttcggtccataaaatctttgggaagggacaactgtaaaggaagttcatagtcgtcaatatgaaggattttaatttctggctttcctatcttcttcttcaggatagcttccttcagcatagaattgttttccaatataaaatattttgctgggttgtccgtactatgtaggctgaccactgggacccttggaccttcacagaataataagaaatgttgattcatgggactaaaactggcatcaaaatatgtacattgttctttcatgaaattacatgaaatgcattggcgattcaataatccttcagtagaagcactgtacag

SEQ ID NO: 767 - DNA, 485 bp, Homo sapiens
  misc_feature 70, 160, 386, 408, 440, 484: n = A,T,C or G
cgaggtctgaaccctcgtggagccattcatacaggtccctaattaaggaacaagtgattatgctaccttngcacggttagggtaccgcggcccgttaaacatgtgtcactgggcaggcggtgcctctaatactggtgatgctagaggtgatgtttttggnaaacaggcggggtaagatttgccgagttccttttactttttttaacctttccttatgagcatgcctgtgttgggttgacagtgagggtaataatgacttgttggtgattgtagatattgggctgttaattgtcagttcagtgttttaatctgacgcaggcttatgcggaggagaatgttttcatgttacttatactaacattagttcttctatagggtgatagatnggtccaattgggtgtgaggagntcacttatatgtttgggattttttaggtaagngggtgttgagcttgaacgctttcttaattgggggctgcttttang

SEQ ID NO: 768 - DNA, 379 bp, Homo sapiens
  misc_feature 35: n = A,T,C or G
ctgatattctattaaagatacaaagaggagctggnaccatttcttctgaaactattacaaacaactgaaaaggtggaatttctccctaattcattttaggaggccagcattatactgataccaaaacctggcagaggtacaataataaaaggaaacttcaagtcagtatcactgatgaacaccaatgtgaaaatcctcaataaaatactggcaaactgaattcagcagcacatcaaaaagctaatccaccacaatcaagtcagcttcatccctgcgatgcaagtctggttcaacatatgcaaatcaataaatacaattcatcagataaacagagctaaagacaaaattcacatgattttctcaatagatgcagaaaagg

SEQ ID NO: 769 - DNA, 518 bp, Homo sapiens
  misc_feature 282, 460, 490: n = A,T,C or G
cgaggtccatatgatgatcagtctatatagtttaaggcgcagatacacaaattttcaaaaatatgggtagaatatagtcaatatgaatggaatagacaatgctttgaaaatcactggagggaggctttattgtttgtgaaaacatgttgtcatcactttttgctttaagcccttggtggtgaaataactcaaaccattcttccttatgctgaagatcgagaaccccaagtatcacatctaccatcccactcatcaatgtgattggtcagtctttgctgaggncctgcatagccagttttaaagttagagttcttgcatatacatatgaaaaggcatgttacttgtgctttcaaagagctttttgcttggtgtaaaaagaaaactcaaattacagtgtgatgtggaatataatggtggtagtttcatcgagatgatgggaaagaattgataagataaagcngaaagatgagcagaattttcagattgggtntggaaagagcacttaagaaagagggtgg

SEQ ID NO: 770 - DNA, 378 bp, Homo sapiens
  misc_feature 163, 283, 340: n = A,T,C or G
tatgggtcctgagtgtggaatataagataacaagacaattcccttgctttcaagggaaatcacactttataaaactttgaattcttgaaatgggtttcagaggttccaaggtcaaattcaagaataagagttaagaagaaaaagactatgagaaaggaagtgntgaccccatttgcatttaaatggcaggaatagtctcaatctactcattggggaaaaatgtatgttgcatatttttgagatattgcaacttgctctctctctttgccaccccaccctttgncatgctctgtttttgggctgaattggcaagaaaaatggctggagggctggaagaagntggacccttcttccttcttccttcttccttctttctcc

SEQ ID NO: 771 - DNA, 207 bp, Homo sapiens
cataaatattatactagcatttaccatctcacttctaggaatactagtatatcgctcacacctcatatcctccctactatgcctagaaggaataatactatcactgttcattatagctactctcataaccctcaacacccactccctcttagccaatattgtgcctattgccatactagtctttgccgcctgcgaagcagcggtagg

SEQ ID NO: 772 - DNA, 384 bp, Homo sapiens
  misc_feature 115: n = A,T,C or G
cctactatgggtgttaaattttttactctctctacaaggttttttcctagtgtccaaagagctgttcctctttggactaacagttaaatttacaaggggatttagagggttctgngggcaaatttaaagttgaactaagattctatcttggacaaccagctatcaccaggctcggtaggtttgtcgcctctacctataaatcttcccactattttgctacatagacgggtgtgctcttttagctgttcttaggtagctcgtctggtttcgggggtcttagctttggctctccttgcaaagttatttctagttaattcattatgcagaaggtataggggttagtccttgctatattatgcttggttataatttttcatctttccc

SEQ ID NO: 773 - DNA, 182 bp, Homo sapiens
cccttttcctaacactcacaacaaaactaactaatactaacatctcagacgctcagggaaatagaaaccgtctgaactatcctgcccgccatcatcctagtcctcatcgccctcccatccctacgcatcctttacataacagacgaggtcaacgatccctcccttaccatcaaatcaattgg

SEQ ID NO: 774 - DNA, 191 bp, Homo sapiens
ccatggctaggtttatagatagttgggtggttgggtgtaaatgagtgaggcaggagtccgaggaggttagttgtggcaataaaaatgattaaggatactagtataagagatcaggttcgtcctttagtgttgtgtatggctatcatttgttttgaggttagtttgattagtcattgttgggtggtaattag

SEQ ID NO: 775 - DNA, 192 bp, Homo sapiens
  misc_feature 12, 45, 51, 62, 90, 114, 134, 163: n = A,T,C or G
ccatggctaagntatatagatagctgggtggctggagtaaatgantgaggnacgagtccgangaggttagttgaggcaataaaaatgatnaaggatactagtataagagatcangttcgtcctttacatgttgngtatggctatcatttgttttgaggctagnttgattagtcattgttgggtggtaattaa

SEQ ID NO: 776 - DNA, 144 bp, Homo sapiens
ctgaccccctagaaccctggctctgccattagctaggacctaagactctgcccacattttggtctgttctctcccattacacataggtttgtctcagcatgcaagagtttttcctttaaaaaaaaaaaaaaaaaaaaaaaaaaa

SEQ ID NO: 777 - DNA, 483 bp, Homo sapiens
  misc_feature 14, 339, 461: n = A,T,C or G
cctactatgggtgntaaattttttactctctctacaaggttttttcctagtgtccaaagagctgttcctctttggactaacagttaagtttacaaggggatttagagggttctgtgggcaaatttaaagttgaactaagattctatcttggacaaccagctatcaccaggctcggtaggtttgtcgcctctacctataaatcttcccactattttgctacatagacgggtgtgctcttttagctgttcttaggtagctcgtctggtttcgggggtcttagctttggctctccttgcaaagttatttctagttaattcattatgcagaaggtataggggntaagtccttgctatattatgcttggatataatttttcatctttcccttgcggtactatatctattgcgccaggtttcaatttctgccgcctatactttatttgggtaaatggtttggctaangttgctggtagaaggtggagtg

SEQ ID NO: 778 - DNA, 393 bp, Homo sapiens
  misc_feature 295, 297, 370: n = A,T,C or G
ctgcatttttattgcgatctgcagatgaactgggaaaatctcattttacaacagaactgagacagacgaccaccatattcactgaggtctaaatttgcagtttccactaatgacattttgatttcccaacagagatacttctggtcttactgcacagtcttttaagagaaatacttccattatgccacattgtccttgatccgtaagtgatgtgttaaggtgcttcaaaggaactctgacctctgaagtacttgagctactttagtatgtccagcctattgctttttgttttagngngtcaccataaatatcaggggcataaaaggctatctattcttaattcaaggataaaacagaagaagcttgtggnataaaacaatagtcaagatccag

SEQ ID NO: 779 - DNA, 277 bp, Homo sapiens
  misc_feature 4: n = A,T,C or G
cctnttgatttgatgggtaaggggagggatcgttgacctcgtctgttatgtaaaggatgcgtagggatgggagggcgatgaggactaggatgatggcgggcaggatagttcagacggtttctatttcctgagcgtctgagatgttagtattagttagttttgttgtgagtgttaggaaaagggcatacaggactaggaagcagataaggaaaatgactatgagggcgtgatcatgaaaggtgataagctcttctatgataggggaagtagcgtcttg

SEQ ID NO: 780 - DNA, 328 bp, Homo sapiens
  misc_feature 5, 19, 33, 38, 84, 323: n = A,T,C or G
catgntatggataaccatnttaactgtattttntgcancccgtaccttcttgggaatacaattgtctaactttttatttttggnctggctgttgtggtgtgcaaaactccgtacattgctattttgccacactgcaacaccttacagatgtggaagatgtgaaatttgtcatcaattatgactaccctaactcctcagaggattatattcatcgaattggaagaactgctcgcagtaccaaaacaggcacagcatacactttctttacacctaataacataaagcaggggagcgaccttatctctgtgcttcgggaagctaancaaac

SEQ ID NO: 781 - DNA, 305 bp, Homo sapiens
  misc_feature 75, 237: n = A,T,C or G
ctgttcagaaagctcattggacctggttttgaaaataaaacaaagttaaaaccctgggaggagttattgtgcagngtggagtactcaggctttcttataaagaaaaaaaaagttatctggtaccaaagtgtgcaacctacagaccctcaggtactgccctgtgacttctctgtatgacatcacaaggctgccaagtgcctgtttttctagaactaggagttggtgaggtttggctantgctgaaaccatgcataggattggtttactaaattaaaaccttattacgtacgtcctccaaaagacag

SEQ ID NO: 782 - DNA, 497 bp, Homo sapiens
  misc_feature 385, 433, 440, 471: n = A,T,C or G
cgaggtggctttaattgatgttaatgccttatgtcaaatgtaaagttagaatttgctagggctgggatagggagtgatatttctaggacttagacattgaaaactaattcagcctgtagtaacctggatggttttcaatggcatggttagtcaaattcatggttttaaacttagaagcagctttcgggggagagggtaggttggagcatttattacatattttactgtttaatgtcttaaccgtgggccttttaatttgtaaacactgaaatgattgttgggctgtggaaaacatttacctatttaccttggaagttttaaaagacagtccactttttagcatgtgtgttgcgtccagcctgtggtcgtcttaactaataaatgngatttttctctcaaaaaaaaaacctccccgggcggccgctcaagggcnaattccncacactggcggccgttactaggggatccganctcggtccaagcttggcgtaatcatg

SEQ ID NO: 783 - protein, 364 aa, Homo sapiens
MWQPLFFKWLLSCCPGSSQIAAAASTQPEDDINTQRKKSQEKMREVTDSPGRPRELTIPQTSSHGANRFVPKSKALEAVKLAIEAGFHHIDSAHVYNNEEQVGLAIRSKIADGSVKREDIFYTSKLWSNSHRPELVRPALERSLKNLQLDYVDLYLIHFPVSVKPGEEVIPKDENGKILFDTVDLCATWEAMEKCKDAGLAKSIGVSNFNHRLLEMILNKPGLKYKPVCNQVECHPYFNQRKLLDFCKSKDIVLVAYSALGSHREEPWVDPNSPVLLEDPVLCALAKKHKRTPALIALRYQLQRGVVVLAKSYNEQRIRQNVQVFEFQLTSEEMKAIDGLNRNVRYLTLDIFAGPPNYPFSDEY

SEQ ID NO: 784 - DNA, 6353 bp, Homo sapiens
tggcgaatgggacgcgccctgtagcggcgcattaagcgcggcgggtgtggtggttacgcgcagcgtgaccgctacacttgccagcgccctagcgcccgctcctttcgctttcttcccttcctttctcgccacgttcgccggctttccccgtcaagctctaaatcgggggctccctttagggttccgatttagtgctttacggcacctcgaccccaaaaaacttgattagggtgatggttcacgtagtgggccatcgccctgatagacggtttttcgccctttgacgttggagtccacgttctttaatagtggactcttgttccaaactggaacaacactcaaccctatctcggtctattcttttgatttataagggattttgccgatttcggcctattggttaaaaaatgagctgatttaacaaaaatttaacgcgaattttaacaaaatattaacgtttacaatttcaggtggcacttttcggggaaatgtgcgcggaacccctatttgtttatttttctaaatacattcaaatatgtatccgctcatgaattaattcttagaaaaactcatcgagcatcaaatgaaactgcaatttattcatatcaggattatcaataccatatttttgaaaaagccgtttctgtaatgaaggagaaaactcaccgaggcagttccataggatggcaagatcctggtatcggtctgcgattccgactcgtccaacatcaatacaacctattaatttcccctcgtcaaaaataaggttatcaagtgagaaatcaccatgagtgacgactgaatccggtgagaatggcaaaagtttatgcatttctttccagacttgttcaacaggccagccattacgctcgtcatcaaaatcactcgcatcaaccaaaccgttattcattcgtgattgcgcctgagcgagacgaaatacgcgatcgctgttaaaaggacaattacaaacaggaatcgaatgcaaccggcgcaggaacactgccagcgcatcaacaatattttcacctgaatcaggatattcttctaatacctggaatgctgttttcccggggatcgcagtggtgagtaaccatgcatcatcaggagtacggataaaatgcttgatggtcggaagaggcataaattccgtcagccagtttagtctgaccatctcatctgtaacatcattggcaacgctacctttgccatgtttcagaaacaactctggcgcatcgggcttcccatacaatcgatagattgtcgcacctgattgcccgacattatcgcgagcccatttatacccatataaatcagcatccatgttggaatttaatcgcggcctagagcaagacgtttcccgttgaatatggctcataacaccccttgtattactgtttatgtaagcagacagttttattgttcatgaccaaaatcccttaacgtgagttttcgttccactgagcgtcagaccccgtagaaaagatcaaaggatcttcttgagatcctttttttctgcgcgtaatctgctgcttgcaaacaaaaaaaccaccgctaccagcggtggtttgtttgccggatcaagagctaccaactctttttccgaaggtaactggcttcagcagagcgcagataccaaatactgtccttctagtgtagccgtagttaggccaccacttcaagaactctgtagcaccgcctacatacctcgctctgctaatcctgttaccagtggctgctgccagtggcgataagtcgtgtcttaccgggttggactcaagacgatagttaccggataaggcgcagcggtcgggctgaacggggggttcgtgcacacagcccagcttggagcgaacgacctacaccgaactgagatacctacagcgtgagctatgagaaagcgccacgcttcccgaagggagaaaggcggacaggtatccggtaagcggcagggtcggaacaggagagcgcacgagggagcttccagggggaaacgcctggtatctttatagtcctgtcgggtttcgccacctctgacttgagcgtcgatttttgtgatgctcgtcaggggggcggagcctatggaaaaacgccagcaacgcggcctttttacggttcctggccttttgctggccttttgctcacatgttctttcctgcgttatcccctgattctgtggataaccgtattaccgcctttgagtgagctgataccgctcgccgcagccgaacgaccgagcgcagcgagtcagtgagcgaggaagcggaagagcgcctgatgcggtattttctccttacgcatctgtgcggtatttcacaccgcatatatggtgcactctcagtacaatctgctctgatgccgcatagttaagccagtatacactccgctatcgctacgtgactgggtcatggctgcgccccgacacccgccaacacccgctgacgcgccctgacgggcttgtctgctcccggcatccgcttacagacaagctgtgaccgtctccgggagctgcatgtgtcagaggttttcaccgtcatcaccgaaacgcgcgaggcagctgcggtaaagctcatcagcgtggtcgtgaagcgattcacagatgtctgcctgttcatccgcgtccagctcgttgagtttctccagaagcgttaatgtctggcttctgataaagcgggccatgttaagggcggttttttcctgtttggtcactgatgcctccgtgtaagggggatttctgttcatgggggtaatgataccgatgaaacgagagaggatgctcacgatacgggttactgatgatgaacatgcccggttactggaacgttgtgagggtaaacaactggcggtatggatgcggcgggaccagagaaaaatcactcagggtcaatgccagcgcttcgttaatacagatgtaggtgttccacagggtagccagcagcatcctgcgatgcagatccggaacataatggtgcagggcgctgacttccgcgtttccagactttacgaaacacggaaaccgaagaccattcatgttgttgctcaggtcgcagacgttttgcagcagcagtcgcttcacgttcgctcgcgtatcggtgattcattctgctaaccagtaaggcaaccccgccagcctagccgggtcctcaacgacaggagcacgatcatgcgcacccgtggggccgccatgccggcgataatggcctgcttctcgccgaaacgtttggtggcgggaccagtgacgaaggcttgagcgagggcgtgcaagattccgaataccgcaagcgacaggccgatcatcgtcgcgctccagcgaaagcggtcctcgccgaaaatgacccagagcgctgccggcacctgtcctacgagttgcatgataaagaagacagtcataagtgcggcgacgatagtcatgccccgcgcccaccggaaggagctgactgggttgaaggctctcaagggcatcggtcgagatcccggtgcctaatgagtgagctaacttacattaattgcgttgcgctcactgcccgctttccagtcgggaaacctgtcgtgccagctgcattaatgaatcggccaacgcgcggggagaggcggtttgcgtattgggcgccagggtggtttttcttttcaccagtgagacgggcaacagctgattgcccttcaccgcctggccctgagagagttgcagcaagcggtccacgctggtttgccccagcaggcgaaaatcctgtttgatggtggttaacggcgggatataacatgagctgtcttcggtatcgtcgtatcccactaccgagatatccgcaccaacgcgcagcccggactcggtaatggcgcgcattgcgcccagcgccatctgatcgttggcaaccagcatcgcagtgggaacgatgccctcattcagcatttgcatggtttgttgaaaaccggacatggcactccagtcgccttcccgttccgctatcggctgaatttgattgcgagtgagatatttatgccagccagccagacgcagacgcgccgagacagaacttaatgggcccgctaacagcgcgatttgctggtgacccaatgcgaccagatgctccacgcccagtcgcgtaccgtcttcatgggagaaaataatactgttgatgggtgtctggtcagagacatcaagaaataacgccggaacattagtgcaggcagcttccacagcaatggcatcctggtcatccagcggatagttaatgatcagcccactgacgcgttgcgcgagaagattgtgcaccgccgctttacaggcttcgacgccgcttcgttctaccatcgacaccaccacgctggcacccagttgatcggcgcgagatttaatcgccgcgacaatttgcgacggcgcgtgcagggccagactggaggtggcaacgccaatcagcaacgactgtttgcccgccagttgttgtgccacgcggttgggaatgtaattcagctccgccatcgccgcttccactttttcccgcgttttcgcagaaacgtggctggcctggttcaccacgcgggaaacggtctgataagagacaccggcatactctgcgacatcgtataacgttactggtttcacattcaccaccctgaattgactctcttccgggcgctatcatgccataccgcgaaaggttttgcgccattcgatggtgtccgggatctcgacgctctcccttatgcgactcctgcattaggaagcagcccagtagtaggttgaggccgttgagcaccgccgccgcaaggaatggtgcatgcaaggagatggcgcccaacagtcccccggccacggggcctgccaccatacccacgccgaaacaagcgctcatgagcccgaagtggcgagcccgatcttccccatcggtgatgtcggcgatataggcgccagcaaccgcacctgtggcgccggtgatgccggccacgatgcgtccggcgtagaggatcgagatctcgatcccgcgaaattaatacgactcactataggggaattgtgagcggataacaattcccctctagaaataattttgtttaactttaagaaggagatatacatatgcagcatcaccaccatcaccactggcagcccctcttcttcaagtggctcttgtcctgttgccctgggagttctcaaattgctgcagcagcctccacccagcctgaggatgacatcaatacacagaggaagaagagtcaggaaaagatgagagaagttacagactctcctgggcgaccccgagagcttaccattcctcagacttcttcacatggtgctaacagatttgttcctaaaagtaaagctctagaggccgtcaaattggcaatagaagccgggttccaccatattgattctgcacatgtttacaataatgaggagcaggttggactggccatccgaagcaagattgcagatggcagtgtgaagagagaagacatattctacacttcaaagctttggagcaattcccatcgaccagagttggtccgaccagccttggaaaggtcactgaaaaatcttcaattggactatgttgacctctatcttattcattttccagtgtctgtaaagccaggtgaggaagtgatcccaaaagatgaaaatggaaaaatactatttgacacagtggatctctgtgccacatgggaggccatggagaagtgtaaagatgcaggattggccaagtccatcggggtgtccaacttcaaccacaggctgctggagatgatcctcaacaagccagggctcaagtacaagcctgtctgcaaccaggtggaatgtcatccttacttcaaccagagaaaactgctggatttctgcaagtcaaaagacattgttctggttgcctatagtgctctgggatcccatcgagaagaaccatgggtggacccgaactccccggtgctcttggaggacccagtcctttgtgccttggcaaaaaagcacaagcgaaccccagccctgattgccctgcgctaccagctgcagcgtggggttgtggtcctggccaagagctacaatgagcagcgcatcagacagaacgtgcaggtgtttgaattccagttgacttcagaggagatgaaagccatagatggcctaaacagaaatgtgcgatatttgacccttgatatttttgctggcccccctaattatccattttctgatgaatattaatgactcgagcaccaccaccaccaccactgagatccggctgctaacaaagcccgaaaggaagctgagttggctgctgccaccgctgagcaataactagcataaccccttggggcctctaaacgggtcttgaggggttttttgctgaaaggaggaactatatccggat

SEQ ID NO: 785 - DNA, 5502 bp, Homo sapiens
tggcgaatgggacgcgccctgtagcggcgcattaagcgcggcgggtgtggtggttacgcgcagcgtgaccgctacacttgccagcgccctagcgcccgctcctttcgctttcttcccttcctttctcgccacgttcgccggctttccccgtcaagctctaaatcgggggctccctttagggttccgatttagtgctttacggcacctcgaccccaaaaaacttgattagggtgatggttcacgtagtgggccatcgccctgatagacggtttttcgccctttgacgttggagtccacgttctttaatagtggactcttgttccaaactggaacaacactcaaccctatctcggtctattcttttgatttataagggattttgccgatttcggcctattggttaaaaaatgagctgatttaacaaaaatttaacgcgaattttaacaaaatattaacgtttacaatttcaggtggcacttttcggggaaatgtgcgcggaacccctatttgtttatttttctaaatacattcaaatatgtatccgctcatgaattaattcttagaaaaactcatcgagcatcaaatgaaactgcaatttattcatatcaggattatcaataccatatttttgaaaaagccgtttctgtaatgaaggagaaaactcaccgaggcagttccataggatggcaagatcctggtatcggtctgcgattccgactcgtccaacatcaatacaacctattaatttcccctcgtcaaaaataaggttatcaagtgagaaatcaccatgagtgacgactgaatccggtgagaatggcaaaagtttatgcatttctttccagacttgttcaacaggccagccattacgctcgtcatcaaaatcactcgcatcaaccaaaccgttattcattcgtgattgcgcctgagcgagacgaaatacgcgatcgctgttaaaaggacaattacaaacaggaatcgaatgcaaccggcgcaggaacactgccagcgcatcaacaatattttcacctgaatcaggatattcttctaatacctggaatgctgttttcccggggatcgcagtggtgagtaaccatgcatcatcaggagtacggataaaatgcttgatggtcggaagaggcataaattccgtcagccagtttagtctgaccatctcatctgtaacatcattggcaacgctacctttgccatgtttcagaaacaactctggcgcatcgggcttcccatacaatcgatagattgtcgcacctgattgcccgacattatcgcgagcccatttatacccatataaatcagcatccatgttggaatttaatcgcggcctagagcaagacgtttcccgttgaatatggctcataacaccccttgtattactgtttatgtaagcagacagttttattgttcatgaccaaaatcccttaacgtgagttttcgttccactgagcgtcagaccccgtagaaaagatcaaaggatcttcttgagatcctttttttctgcgcgtaatctgctgcttgcaaacaaaaaaaccaccgctaccagcggtggtttgtttgccggatcaagagctaccaactctttttccgaaggtaactggcttcagcagagcgcagataccaaatactgtccttctagtgtagccgtagttaggccaccacttcaagaactctgtagcaccgcctacatacctcgctctgctaatcctgttaccagtggctgctgccagtggcgataagtcgtgtcttaccgggttggactcaagacgatagttaccggataaggcgcagcggtcgggctgaacggggggttcgtgcacacagcccagcttggagcgaacgacctacaccgaactgagatacctacagcgtgagctatgagaaagcgccacgcttcccgaagggagaaaggcggacaggtatccggtaagcggcagggtcggaacaggagagcgcacgagggagcttccagggggaaacgcctggtatctttatagtcctgtcgggtttcgccacctctgacttgagcgtcgatttttgtgatgctcgtcaggggggcggagcctatggaaaaacgccagcaacgcggcctttttacggttcctggccttttgctggccttttgctcacatgttctttcctgcgttatcccctgattctgtggataaccgtattaccgcctttgagtgagctgataccgctcgccgcagccgaacgaccgagcgcagcgagtcagtgagcgaggaagcggaagagcgcctgatgcggtattttctccttacgcatctgtgcggtatttcacaccgcatatatggtgcactctcagtacaatctgctctgatgccgcatagttaagccagtatacactccgctatcgctacgtgactgggtcatggctgcgccccgacacccgccaacacccgctgacgcgccctgacgggcttgtctgctcccggcatccgcttacagacaagctgtgaccgtctccgggagctgcatgtgtcagaggttttcaccgtcatcaccgaaacgcgcgaggcagctgcggtaaagctcatcagcgtggtcgtgaagcgattcacagatgtctgcctgttcatccgcgtccagctcgttgagtttctccagaagcgttaatgtctggcttctgataaagcgggccatgttaagggcggttttttcctgtttggtcactgatgcctccgtgtaagggggatttctgttcatgggggtaatgataccgatgaaacgagagaggatgctcacgatacgggttactgatgatgaacatgcccggttactggaacgttgtgagggtaaacaactggcggtatggatgcggcgggaccagagaaaaatcactcagggtcaatgccagcgcttcgttaatacagatgtaggtgttccacagggtagccagcagcatcctgcgatgcagatccggaacataatggtgcagggcgctgacttccgcgtttccagactttacgaaacacggaaaccgaagaccattcatgttgttgctcaggtcgcagacgttttgcagcagcagtcgcttcacgttcgctcgcgtatcggtgattcattctgctaaccagtaaggcaaccccgccagcctagccgggtcctcaacgacaggagcacgatcatgcgcacccgtggggccgccatgccggcgataatggcctgcttctcgccgaaacgtttggtggcgggaccagtgacgaaggcttgagcgagggcgtgcaagattccgaataccgcaagcgacaggccgatcatcgtcgcgctccagcgaaagcggtcctcgccgaaaatgacccagagcgctgccggcacctgtcctacgagttgcatgataaagaagacagtcataagtgcggcgacgatagtcatgccccgcgcccaccggaaggagctgactgggttgaaggctctcaagggcatcggtcgagatcccggtgcctaatgagtgagctaacttacattaattgcgttgcgctcactgcccgctttccagtcgggaaacctgtcgtgccagctgcattaatgaatcggccaacgcgcggggagaggcggtttgcgtattgggcgccagggtggtttttcttttcaccagtgagacgggcaacagctgattgcccttcaccgcctggccctgagagagttgcagcaagcggtccacgctggtttgccccagcaggcgaaaatcctgtttgatggtggttaacggcgggatataacatgagctgtcttcggtatcgtcgtatcccactaccgagatatccgcaccaacgcgcagcccggactcggtaatggcgcgcattgcgcccagcgccatctgatcgttggcaaccagcatcgcagtgggaacgatgccctcattcagcatttgcatggtttgttgaaaaccggacatggcactccagtcgccttcccgttccgctatcggctgaatttgattgcgagtgagatatttatgccagccagccagacgcagacgcgccgagacagaacttaatgggcccgctaacagcgcgatttgctggtgacccaatgcgaccagatgctccacgcccagtcgcgtaccgtcttcatgggagaaaataatactgttgatgggtgtctggtcagagacatcaagaaataacgccggaacattagtgcaggcagcttccacagcaatggcatcctggtcatccagcggatagttaatgatcagcccactgacgcgttgcgcgagaagattgtgcaccgccgctttacaggcttcgacgccgcttcgttctaccatcgacaccaccacgctggcacccagttgatcggcgcgagatttaatcgccgcgacaatttgcgacggcgcgtgcagggccagactggaggtggcaacgccaatcagcaacgactgtttgcccgccagttgttgtgccacgcggttgggaatgtaattcagctccgccatcgccgcttccactttttcccgcgttttcgcagaaacgtggctggcctggttcaccacgcgggaaacggtctgataagagacaccggcatactctgcgacatcgtataacgttactggtttcacattcaccaccctgaattgactctcttccgggcgctatcatgccataccgcgaaaggttttgcgccattcgatggtgtccgggatctcgacgctctcccttatgcgactcctgcattaggaagcagcccagtagtaggttgaggccgttgagcaccgccgccgcaaggaatggtgcatgcaaggagatggcgcccaacagtcccccggccacggggcctgccaccatacccacgccgaaacaagcgctcatgagcccgaagtggcgagcccgatcttccccatcggtgatgtcggcgatataggcgccagcaaccgcacctgtggcgccggtgatgccggccacgatgcgtccggcgtagaggatcgagatctcgatcccgcgaaattaatacgactcactataggggaattgtgagcggataacaattcccctctagaaataattttgtttaactttaagaaggagatatacatatgcagcatcaccaccatcaccactggcagcccctcttcttcaagtggctcttgtcctgttgccctgggagttctcaaattgctgcagcagcctccacccagcctgaggatgacatcaatacacagaggaagaagagtcaggaaaagatgagagaagttacagactctcctgggcgaccccgagagcttaccattcctcagacttcttcacatggtgctaacagatttgtttgatgaattctgcagatatccatcacactggcggccgctcgagcaccaccaccaccaccactgagatccggctgctaacaaagcccgaaaggaagctgagttggctgctgccaccgctgagcaataactagcataaccccttggggcctctaaacgggtcttgaggggttttttgctgaaaggaggaactatatccggat

SEQ ID NO: 786 - protein, 108 aa, Homo sapiens
RRSCEPATRVPEVWILSPLLRHGGHTQTQNHTASPRSPVMESPKKKNQQLKVGILHLGSRQKKIRIQLRSQVLGREMRDMEGDLQELHQSNTGDKSGFGFRRQGEDNT

SEQ ID NO: 787 - protein, 152 aa, Homo sapiens
RPKEEVPRSKALEVTKLAIEAGFRHIDSAHLYNNEEQVGLAIRSKIADGSVKREDIFYTSKLWSTFHRPELVRPALENSLKKAQLDYVDLYLIHSPMSLKPGEELSPTDENGKVIFDIVDLCTTWEAMEKCKDAGLAKSIGVSNFNPQAAGD

SEQ ID NO: 788 - DNA, 1633 bp, Homo sapiens; identical to SEQ ID NO: 316

SEQ ID NO: 789 - protein, 200 aa, Homo sapiens
MAKGDPKKPKGKMSAYAFFVQTCREEHKKKNPEVPVNFAEFSKKCSERWKTMSGKEKSKFDEMAKADKVRYDREMKDYGPAKGGKKKKDPNAPKRPPSGFFLFCSEFRPKIKSTNPGISIGDVAKKLGEMWNNLNDSEKQPYITKAAKLKEKYEKDVADYKSKGKFDGAKGPAKVARKKVEEEDEEEEEEEEEEEEEEDE

SEQ ID NO: 790 - DNA, 457 bp, Homo sapiens
ttcgcctgtgttgggaacgcggcggagctgtgagccggcgactcgggtccctgaggtctggattctttctccgctactgagacacggcggacacacacaaacacagaaccacacagccagtcccaggagcccagtaatggagagccccaaaaagaagaaccagcagctgaaagtcgggatcctacacctgggcagcagacagaagaagatcaggatacagctgagatcccagtgcgcgacatggaaggtgatctgcaagagctgcatcagtcaaacaccggggataaatctggatttgggttccggcgtcaaggtgaagataatacctaaagaggaacactgtaaaatgccagaagcaggtgaagagcaaccacaagtttaaatgaagacaagctgaaacaacgcaagctggttttatattagatatttgacttaaactatctcaataaagttttgc

SEQ ID NO: 791 - protein, 126 aa, Homo sapiens
SPVLGTRRSCEPATRVPEVWILSPLLRHGGHTQTQNHTASPRSPVMESPKKKNQQLKVGILHLGSRQKKIRIQLRSQCATWKVICKSCISQTPGINLDLGSGVKVKIIPKEEHCKMPEAGEEQPQV

SEQ ID NO: 792 - DNA, 461 bp, Homo sapiens
cggcggagctgtgagccggcgactcgggtccctgaggtctggattctttctccgctactgagacacggcggacacacacaaacacagaaccacacagccagtcccaggagcccagtaatggagagccccaaaaagaagaaccagcagctgaaagtcgggatcctacacctgggcagcagacagaagaagatcaggatacagctgagatcccaggtgctgggaagggaaatgcgcgacatggaaggtgatctgcaagagctgcatcagtcaaacaccggggataaatctggatttgggttccggcgtcaaggtgaagataatacctaaagaggaacactgtaaaatgccagaagcaggtgaagagcaaccacaagtttaaatgaagacaagctgaaacaacgcaagctggttttatattagatatttgacttaaactatctcaataaagttttgcagctttc

SEQ ID NO: 793 - protein, 108 aa, Homo sapiens; identical to SEQ ID NO: 786

SEQ ID NO: 794 - DNA, 970 bp, Homo sapiens
tgggctcccagagctcgggtcctttgcagcctccaccctggcgatggctccctggtcctactttctctctcaaactggctttttctcattcctttgactccgccagacttcctcgcccccatgacctggtgttgtgtctgatcaccccaacattcctggctgcccaatgtggggcaatgaagaccccagtgaaggaatgctagagtgtgtgaaagtggaggacgcatcgtcaaaggacacctgaggacgtctcaaagaagctcggcgggagagctgagcgctcggaagaaccaagaatcatctcttttgaaaaatcgattcatcaaatgaatcttcagccaacaactgttcaagaaggatgcaaatatcacagtgttagatgaactttctggttgacacctgacaggaagagcctctgtattggaccaccatgtttgtgctcactgtgtagtaacaaaccaacacaccaaaatagcgggagttgccactgacaaagagttgaatgatcaaatgacggccaaaggaggaggttccgagaagtaaagctttggaggtcacaaaattagcaatagaagctgggttccgccatatagattctgctcatttatacaataatgaggagcaggttggactggccatccgaagcaagattgcagatggcagtgtgaagagagaagacatattctacacttcaaagctttggtccacttttcatcgaccagagttggtccgaccagccttggaaaactcactgaaaaaagctcaattggactatgttgacctctatcttattcattctccaatgtctctaaagccaggtgaggaactttcaccaacagatgaaaatggaaaagtaatatttgacatagtggatctctgtaccacctgggaggccatggagaagtgtaaggatgcaggattggccaagtccattggggtgtcaaacttcaacccgcaggcagctggagat

SEQ ID NO: 795 - protein, 152 aa, Homo sapiens; identical to SEQ ID NO: 787

SEQ ID NO: 796 - DNA, 2435 bp, Homo sapiens
atccactcgggccgcatcgccgcggtgcacaacgtgccgctgagcgtgctcatccggccgctgccgtccgtgttggaccccgccaaggtgcagagcctcgtggacacgatccgggaggacccagacagcgtgccccccatcgatgtcctctggatcaaaggggcccagggaggtgactacttctactcctttgggggctgccaccgctacgcggcctaccagcaactgcagcgagagaccatccccgccaagcttgtccagtccactctctcagacctaagggtgtacctgggagcatccacaccagacttgcagtagcagcctccttggcacctgctgccaccttcaagagcccagaagacacacctggcctccagcaggctgggccatgcagaagggatagcaggggtgcattctctttgcacctggcgagagggtctgactctgggcacccctctcaccagctacaaggccttggactcactgtacagtgtgggagccccagttcccacctctgtgacaataggatcatggccttacccttgaagcattaccgagaaggagaacagagatgggcttgaagagccacgtgctgccggctccaaattcccaaggacaaggatccctctgcatttttgtctatgtaacctcttatatggactacattcagctgcaaggaaaggaaaaccttgattgcagtggtttaaacaaacagaagattgtttttccacatagcatggattctggagatgggtggctaatggtattggttcaacaactccacgaaggtaggggtcacgtcttggatccttttgccttaatctcagtgctcgttacttcatggtcccaagatggctgctgtatccccaagaatcatgtctgcgttcaaggaaggaggggtggaggaagaggaagggccaaactagctggacccgtcaccttctatcagaaagtaaaacctcgtcagaagtctgtttcctgctctctccctctgcatatcttcacttagatgcccttggcccgagccagctaccattgcacctctagctgcaaacaaagctaagacagcagggaacagaattgtcatggctgaatagaccaatcgtgttccatctactgagactggcacactgcctcctgcaataaaactgggatcccattaccaagagagaaatgcagaattgtgtaccagttagcttttgctgtgtaacaaaccatccccaaacttggcagctagaaacaaaccctgtattttcccacaatcctatgggttggcaatttgggctgggctcaacagggcagttctgctgctcacacctgggatccctcatggagctaaggtcagctgttacctcagctgggcctggatggtctaggatagccttactcacttgcctggcaggtgacaggctgttggctggaattgcttggttctcctccatgtggcctctccagcaggctagctcaggcttattcacatgatggcttcaggattccaaagagagtgagagtagaagctgaaagacttcttgagttcttggcctggaactgggactaggacagtgtcacttctgctaagttcttttggtcagagcaaatcacaaggctttacccagattcaagggatgagaaacagactacatgtcttgatgaggggaaccacaaagagcttgtggccatttttcacctatcacaaataattttggatgggtatttatttggataaaggtatttccctcttccccctttctctctgtctcatggggcctcactctgccaagttggaaggcactaagacattgtcctggccctcagggtctaggggaagaggtgttggggcaggaagtgagtctctccatgggctggacccactgtagtaggagtgcctccttgtctgcactgctggtatggggttaggccaggtaggacattccagaggggcttctgaaaaccaagagtccctggggaaagggaacagagtaaggcaggccttgttctcactgccctctaagggaacttggtcactcggcacttttaagcctcagtttctccagttcaataataaggacaagagcttttcccatgcattctctttccccgggaaagttgactgaggtgaccagtaatagaattgaaaagggagagtgtcttcagtgcaatgtggcatcctggattgggtcttggaacaaaaacaggacattagtgggaaaattggaaatctgaaaaaagtctgaattttagttaatataccaatttcagtcycttggttttgacagatgtaccatggtgatgtaagatgttgaccttggggtaggctgggtgaagggtatacaggaactctttgtactatctctgcaacttctctgtaaatctagtatcattccaaaataaaagtttatttaatttaaaaaaaaaaaaaaaaaaaaaaaaaaaaa

SEQ ID NO: 797 - protein, 120 aa, Homo sapiens [sequence omitted]

SEQ ID NO: 798 - protein, 164 aa, Homo sapiens
PRVRGRVGSASHGGTWRAEPESGWGPRGRGRTAAGSGEKRALPWHGPPPPAARNGMARPELRPGGGGESRGGGDDGAACRRNAGQGRRGSGGARGARAERRRAGRQHPLGPHRRGAQRAAERAHPAAAVRVGPRQGAEPRGHDPGGPRQRAPHRCPLDQRGPGR

SEQ ID NO: 799 - protein, 60 aa, Homo sapiens
HASADAWAARVMAAPGERSRSRAGDRGVEAGPRRGRGRNARCPGTGPPPRPRGMVWPGRS

SEQ ID NO: 800 - DNA, 2477 bp, Homo sapiens
gccttggcaaaaaagcacaagcgaaccccagccctgattgccctgcgctaccagctacagcgtggggttgtggtcctggccaagagctacaatgagcagcgcatcagacagaacgtgcaggtgtttgaattccagttgacttcagaggagatgaaagccatagatggcctaaacagaaatgtgcgatatttgacccttgatatttttgctggcccccctaattatccattttctgatgaatattaacatggagggcattgcatgaggtctgccagaaggccctgcgtgtggatggtgacacagaggatggctctatgctggtgactggacacatcgcctctggttaaatctctcctgcttggtgatttcagcaagctacagcaaagcccattggccagaaaggaaagacaataattttgttttttcattttgaaaaaattaaatgctctctcctaaagattcttcacctactttggtctccataacttctatgttttctttccttctgacacactagtgcccctaaattgtgatttgcctatacgtttagggccggggttggaagatgttaacaaccatttaagattcatttctgcagtgggagtgggtggagtttcaccctctgggaaaggggcaggtgacaggtatttatcagtcagtgcctctctagctcttgtaggaagaagcacacgcaggatggagtctagaggatgagcgatattgactagcaattcatgggctccctccagcagtgcgagggtcagagtttctggagccttgggaggaggcatccctgtgagggggggttagggagatgggagggcaccaggaaaagtgattagaagtcaggtatgggaaggctaaataggacagagtcgagtacatctctgcttggaaaaacatatcaacacccttttttttgaacattatatcttgctcataaaagaaaactttccacattgttttaacaaaccccacagctgagagtcaggcctgaatctttgatgtgtgcccagtcacagagttgaccctattggtttgtggtggggcagggcatcaaagacatcattgactaatcacattcccctgaatagctcatatttagaaaatattcttagattctaaaaatgtactattaatttgtgatattcagtcttttaaatattttatacattaaacaggcatagttacaaatataaaacaaaaatatcccaaagccattatgcatggcactcaagattaaaatgggaaataatacatctaataaatcaaatgttccaagacttcaaaggtcttttggaaacaggctatgtaaaacagcacactggtttcaaactttggtaaattttaagaacaactcttacaaaggcatttaattcttatacataattttcaggggacctaagttaatcagctaatcatgaagacatgattttcattttagaaaacacttttgaaaacttgggataatctcatgccttaatgatcaaagcattatgagaaggacagtggtttttaacctgggcatatgttctaacacatttactctccactattcgtactctggtagccatgttaaccccatcagagattccttctcaagccatgtctcagagctgagaggcatcccagcaagttttgcagctcacagttttttccgtaaattacttattctataaaattggagtaggccataaactttggagggccctagaccaattttttggattatttttcgtcttctatcattccgctgatcttagatattctctgcattaaatattaaatatcacttctaggctgaaaaatccccctaaaaatatttctagctcagatttttcctccaaattctgcaatagaagatcacaatgtgaactctgcatctccatgttaaagtctaatggacattcacacttagcatgtctcaaagaaatctcatgtaaaccatggccatcctgttctaccttaactttctgagtctatggaatgataatttcacatctcataaacttgactgatgtaagtgtcaagaaaagattgacattttgttaaaagttagtagtgaagtgtgtaacgcttaagcaaactttcatatttcaaatctctttagcaagtgtaactcttttttcaagatgtgaaataatcattaggtcagtcatttgtaaatagtacatctgctatggactttttccagttcttcaccatccatttttataaaactcttattgttaaaaaaaaagttactcagaatttcataaagccaaacacctgatttcaggaacacttgagatgtaagaaaattttatagggacctccaatcactaattttcctattttttctctcaaagaaatgctgaagggaggaattcaggttgaatgaaaggaaatagtaacttacagccatatagagttataaagacttcttgtaaatgtgaacatatggtaaaatataaaaacatgtatttttgaaaaaaaaa

SEQ ID NO: 801 - DNA, 1619 bp, Homo sapiens
ggtacgcgcccgcttgcgctccggcctctactcggcggtcatcgtctacgacgagcgcagcccgcgcgccgagagcctccgcgaggacagcaccgtgtcgctggtggtgcaggcgctgcgccgcaacgccgagcgcaccgacatctgcctgctcaaaggcggctatgagaggttttcctccgagtacccagaattctgttctaaaaccaaggccctggcagccatcccacccccggttccccccagtgccacagagcccttggacctgggctgcagctcctgtgggaccccactacacgaccaggggggtcctgtggagatccttcccttcctctacctcggcagtgcctaccatgctgcccggagagacatgctggacgccctgggcatcacggctctgttgaatgtctcctcggactgcccaaaccactttgaaggacactatcagtacaagtgcatcccagtggaagataaccacaaggccgacatcagctcctggttcatggaagccatagagtacatcgatgccgtgaaggactgccgtgggcgcgtgctggtgcactgccaggcgggcatctcgcggtcggccaccatctgcctggcctacctgatgatgaagaaacgggtgaggctggaggaggccttcgagttcgttaagcagcgccgcagcattatctcgcccaacttcagcttcatggggcagctgctgcagttcgagtcccaggtgctggccacgtcctgtgctgcggaggctgctagcccctcgggacccctgcgggagcggggcaagacccccgccacccccacctcgcagttcgtcttcagctttccggtctccgtgggcgtgcactcggcccccagcagcctgccctacctgcacagccccatcaccacctctcccagctgttagagccgccctgggggccccagaaccagagctggctcccagcaagggtaggacgggccgcatgcgggcagaaagttgggactgagcagctgggagcaggcgaccgagctccttccccatcatttctccttggccaacgacgaggccagccagaatggcaataaggactccgaatacataataaaagcaaacagaacactccaacttagagcaataacggctgccgcagcagccagggaagaccttggtttggtttatgtgtcagtttcacttttccgatagaaatttcttacctcatttttttaagcagtaaggcttgaagtgatgaaacccacagatcctagcaaatgtgcccaaccagctttactaaagggggaggaagggagggcaaagggatgagaagacaagtttcccagaagtgcctggttctgtgtacttgtccctttgttgtcgttgttgtagttaaaggaatttcattttttaaaagaaatcttcgaaggtgtggttttcatttctcagtcaccaacagatgaataattatgcttaataataaagtatttattaagactttcttcagagtatgaaagtacaaaaagtctagttacagtggatttagaatatatttatgttgatgtcaaacagctgagcaccgtagcatgcagatgtcaaggcagttaggaagaattaggtttgaattgctttttaaaaaaaa

SEQ ID NO: 802 - DNA, 3115 bp, Homo sapiens
cgtccgcggacgcgtgggctcatcttgagaagcaggcgggttgggtgggaggaggaagaaagggaagaattaggtttgaattgcttttttaaaaaaaaagaaaagaaaaaaaaagacagcatctcactatgttgccaaggctcatctcaagctcttgggctcaagagatcctcccacctcggcctcctgagtagctgggactgcaggtgtgtgtcatcatgaccaatgtgaattgcttttgaagctggttcatgggcatgtaggccaccgaagcaattttagaccacagtaagtcaagcttttttccctccgatgatcactgggtggttgcagcattttttgcataaacctgcctaagacttgtctatcgtctgtgatcaatatgccatattacactaaggtgctcctggaaaattgggtgcagttcaaattttcctacagcaaatcatttggcaaggccagccattggggaaaccagacaactagagataaccctgaaatgaatccttttgtaaattgaagcaccatcttttctttttttgcataaattggaggttttaattttagggcagttacctgaagtgaaatataccaacaatttcttgtgttctttaaattcctagttaggtgaatatttttgaaggtcctcttttgaataaagaggggaatggacaccacatttcaggtcttctcgaagtgtggaagggcaagagagcatcagtgagctgatggtggattgcttacatcggattccattggtatgaatttcccaaactggaaatcaaagcgccagggtggggttggggctgactgctggtgagggggctggccgctggctcccgtgacgtgcgtcatgggcacgcaggcgccattttgaatctatcgtcggcacgtgggtgccattttgaatccttagttgggcctttctaaatggagaatggctttggagggagacacgttttctgtggggagggtttgggggggagggaggagggaacaagctacatgctattttgtttgtagtattgtggaacagtcttgttatggagtgccagcttagaggttgttgcaaacttgtctagaagtgagagcatggttttttttagccctttgagagtctacatctaatgaacattcttgctcacccataaataacgtcaagcctcaatgtcaccgtcacgttgggatactctttctcatctggcatcctagacaggacaaggttggttacctttccttccatgaaccatgaacctgtgacggcatcattcatcctgacttcaccaagctccgcctgtgggtgaggccagagctcccactggcaatttttagaagagccagaggctccctgcttcctctagaaataacagttcagggtgaagcatggagggtttcagttcccagacaatggaaccatttagagacaacacagttggacatttccactttttccttgattcctggaagtccagtgggttctgcagctgaaaaagccctgggtcccagcagcagagagacaggacagaggggatgcttgggcggggagggacggtaacctgcagaacagattccatttttatagaacgagtacacgtttgctaaaacagtcctgctttcccagactggattcccaccacagggacagtcggaactcaggactagctccagcgacatctttcctccgaattcaagccttctatcacaatgtcaaaacagctatttataaagccattttcattgtacttgataacagcacgagtcccaaaacttttagaaataaaataggacattggcttgattgaaaagagggactttttaaaaattgttctttcgtcagaagccttttggatgacttacaatagctctgatgaagataccaccccagcgtcagtccaataggtcagtgagtttcaacaggcatccatccctcccatgaagggattctggtgaggggaagtttctgtaatgacaggaaagcattgaccctcattgattgtcaactttggtattagccatgaaagacaggatgctcattgggtgttctgtagagtgaggaatgctgcctattccctcccagaacgtctgacccaggggtgtgtgttgaggagccctgggggaaatggaccaagttttcccacagagcagtattaggctgaagagcaggtgactggtaggccccagctcccatcattccctcccaaagccattttgttcagttgctcatccacgctggattccagagagttttccaatttgggaagccatgagaaaggtttttaaatcttgggaagatggagagagggacataggatagttgactccaacatgacaggaagaggctggagattgggaattggccatcaaccaagcctgtagtagtaaagccatggtcccgcattggaattacttggggaacttatacagttctgatacccaggctctcctagaccagttcaaccaattctaggtgggggactcaggcatcagtgtgtttcgtagctccccgggtgttttccctgtgcagccgagcttgggaaactgccatgctttttggatgtcaaggcgctgttggaggctgggtgtgacagcacagagccaggttgtcttgtggaaaccacagccacgggtttgccactggctcagcatggcctcactgccagtcccagcctggctgagggacaagatggtttctcttgggagttcctgagtggagcacccttccaggctttttgaaagccagctgatctgtggagccttgttaagggactcaatacggtgtttggatattgatgtttttccttgagactgtcttgtccatcaataaagatggaggatgtctcctctttgaaccccgcttccccaccagtactctctctcccttagagtttatgagttattcaaggaggagacttcttaaagacagcaacgcaattcttgtaacttgtgtaaatagccccatctttcagagtgataccatttctacatttgataatgcctgtattcctgtaggatgtatatagtttaggggattttttttttgtttggttttgttttttagaagtcaatatgtctggttttatttattgcttgaaaaagatcatttgaaaaaaataaa

SEQ ID NO: 803 - DNA, 1238 bp, Homo sapiens
cccgggttctcttctcttcctcgcgcgcccagccgcctcggttcccggcgaccatggtgacgatggaggagctgcgggagatggactgcagtgtgctcaaaaggctgatgaaccgggacgagaatggcggcggcgcgggcggcagcggcagccacggcaccctggggctgccgagcggcggcaagtgcctgctgctggactgcagaccgttcctggcgcacagcgcgggctacatcctaggttcggtcaacgtgcgctgtaacaccatcgtgcggcggcgggctaagggctccgtgagcctggagcagatcctgcccgccgaggaggaggtacgcgcccgcttgcgctccggcctctactcggcggtcatcgtctacgacgagcgcagcccgcgcgccgagagcctccgcgaggacagcaccgtgtcgctggtggtgcaggcgctgcgccgcaacgccgagcgcaccgacatctgcctgctcaaaggcggctatgagaggttttcctccgagtacccagaattctgttctaaaaccaaggccctggcagccatcccacccccggttccccccagcgccacagagcccttggacctggactgcagctcctgtgggaccccactacacgaccaggagggtcctgtggagatccttcccttcctctacctcggcagtgcctaccatgctgcccggagagacatgctggacgccctgggcatcacggctctgttgaatgtctcctcggactgcccaaaccactttgaaggacactatcagtacaagtgcatcccagtggaagataaccacaaggccgacatcagctcctggttcatggaagccatagagtacatcgatgccgtgaaggactgccgtgggcgcgtgctggtgcactgccaggcgggcatctcgcggtcggccaccatctgcctggcctacctgatgatgaagaaacgggtgaggctggaggaggccttcgagttcgttaagcagcgccgcagcatcatctcgcccaacttcagcttcatggggcagctgctgcagttcgagtcccaggtgctggccacgtcctgtgctgcggaggctgctagcccctcgggacccctgggggagcggggcaagacccccgccacccccacctcgcagttcgtcttcagctttccggtctccgtgggcgtgcactcggcccccagcagcctgccctacctgcacagccccatcaccacctctcccagctgttag

SEQ ID NO: 804 - DNA, 4637 bp, Homo sapiens
ggtacgcgcccgcttgcgctccggcctctactcggcggtcatcgtctacgacgagcgcagcccgcgcgccgagagcctccgcgaggacagcaccgtgtcgctggtggtgcaggcgctgcgccgcaacgccgagcgcaccgacatctgcctgctcaaaggcggctatgagaggttttcctccgagtacccagaattctgttctaaaaccaaggccctggcagccatcccacccccggttccccccagtgccacagagcccttggacctgggctgcagctcctgtgggaccccactacacgaccaggggggtcctgtggagatccttcccttcctctacctcggcagtgcctaccatgctgcccggagagacatgctggacgccctgggcatcacggctctgttgaatgtctcctcggactgcccaaaccactttgaaggacactatcagtacaagtgcatcccagtggaagataaccacaaggccgacatcagctcctggttcatggaagccatagagtacatcgatgccgtgaaggactgccgtgggcgcgtgctggtgcactgccaggcgggcatctcgcggtcggccaccatctgcctggcctacctgatgatgaagaaacgggtgaggctggaggaggccttcgagttcgttaagcagcgccgcagcattatctcgcccaacttcagcttcatggggcagctgctgcagttcgagtcccaggtgctggccacgtcctgtgctgcggaggctgctagcccctcgggacccctgcgggagcggggcaagacccccgccacccccacctcgcagttcgtcttcagctttccggtctccgtgggcgtgcactcggcccccagcagcctgccctacctgcacagccccatcaccacctctcccagctgttagagccgccctgggggccccagaaccagagctggctcccagcaagggtaggacgggccgcatgcgggcagaaagttgggactgagcagctgggagcaggcgaccgagctccttccccatcatttctccttggccaacgacgaggccagccagaatggcaataaggactccgaatacataataaaagcaaacagaacactccaacttagagcaataacggctgccgcagcagccagggaagaccttggtttggtttatgtgtcagtttcacttttccgatagaaatttcttacctcatttttttaagcagtaaggcttgaagtgatgaaacccacagatcctagcaaatgtgcccaaccagctttactaaagggggaggaagggagggcaaagggatgagaagacaagtttcccagaagtgcctggttctgtgtacttgtccctttgttgtcgttgttgtagttaaaggaatttcattttttaaaagaaatcttcgaaggtgtggttttcatttctcagtcaccaacagatgaataattatgcttaataataaagtatttattaagactttcttcagagtatgaaagtacaaaaagtctagttacagtggatttagaatatatttatgttgatgtcaaacagctgagcaccgtagcatgcagatgtcaaggcagttaggaagaattaggtttgaattgcttttttaaaaaaaaagaaaagaaaaaaaaagacagcatctcactatgttgccaaggctcatctcaagctcttgggctcaagagatcctcccacctcggcctcctgagtagctgggactgcaggtgtgtgtcatcatgaccaatgtgaattgcttttgaagctggttcatgggcatgtaggccaccgaagcaattttagaccacagtaagtcaagcttttttccctccgatgatcactgggtggttgcagcattttttgcataaacctgcctaagacttgtctatcgtctgtgatcaatatgccatattacactaaggtgctcctggaaaattgggtgcagttcaaattttcctacagcaaatcatttggcaaggccagccattggggaaaccagacaactagagataaccctgaaatgaatccttttgtaaattgaagcaccatcttttctttttttgcataaattggaggttttaattttagggcagttacctgaagtgaaatataccaacaatttcttgtgttctttaaattcctagttaggtgaatatttttgaaggtcctcttttgaataaagaggggaatggacaccacatttcaggtcttctcgaagtgtggaagggcaagagagcatcagtgagctgatggtggattgcttacatcggattccattggtatgaatttcccaaactggaaatcaaagcgccagggtggggttggggctgactgctggtgagggggctggccgctggctcccgtgacgtgcgtcatgggcacgcaggcgccattttgaatctatcgtcggcacgtgggtgccattttgaatccttagttgggcctttctaaatggagaatggctttggagggagacacgttttctgtggggagggtttgggggggagggaggagggaacaagctacatgctattttgtttgtagtattgtggaacagtcttgttatggagtgccagcttagaggttgttgcaaacttgtctagaagtgagagcatggttttttttagccctttgagagtctacatctaatgaacattcttgctcacccataaataacgtcaagcctcaatgtcaccgtcacgttgggatactctttctcatctggcatcctagacaggacaaggttggttacctttccttccatgaaccatgaacctgtgacggcatcattcatcctgacttcaccaagctccgcctgtgggtgaggccagagctcccactggcaatttttagaagagccagaggctccctgcttcctctagaaataacagttcagggtgaagcatggagggtttcagttcccagacaatggaaccatttagagacaacacagttggacatttccactttttccttgattcctggaagtccagtgggttctgcagctgaaaaagccctgggtcccagcagcagagagacaggacagaggggatgcttgggcggggagggacggtaacctgcagaacagattccatttttatagaacgagtacacgtttgctaaaacagtcctgctttcccagactggattcccaccacagggacagtcggaactcaggactagctccagcgacatctttcctccgaattcaagccttctatcacaatgtcaaaacagctatttataaagccattttcattgtacttgataacagcacgagtcccaaaacttttagaaataaaataggacattggcttgattgaaaagagggactttttaaaaattgttctttcgtcagaagccttttggatgacttacaatagctctgatgaagataccaccccagcgtcagtccaataggtcagtgagtttcaacaggcatccatccctcccatgaagggattctggtgaggggaagtttctgtaatgacaggaaagcattgaccctcattgattgtcaactttggtattagccatgaaagacaggatgctcattgggtgttctgtagagtgaggaatgctgcctattccctcccagaacgtctgacccaggggtgtgtgttgaggagccctgggggaaatggaccaagttttcccacagagcagtattaggctgaagagcaggtgactggtaggccccagctcccatcattccctcccaaagccattttgttcagttgctcatccacgctggattccagagagttttccaatttgggaagccatgagaaaggtttttaaatcttgggaagatggagagagggacataggatagttgactccaacatgacaggaagaggctggagattgggaattggccatcaaccaagcctgtagtagtaaagccatggtcccgcattggaattacttggggaacttatacagttctgatacccaggctctcctagaccagttcaaccaattctaggtgggggactcaggcatcagtgtgtttcgtagctccccgggtgttttccctgtgcagccgagcttgggaaactgccatgctttttggatgtcaaggcgctgttggaggctgggtgtgacagcacagagccaggttgtcttgtggaaaccacagccacgggtttgccactggctcagcatggcctcactgccagtcccagcctggctgagggacaagatggtttctcttgggagttcctgagtggagcacccttccaggctttttgaaagccagctgatctgtggagccttgttaagggactcaatacggtgtttggatattgatgtttttccttgagactgtcttgtccatcaataaagatggaggatgtctcctctttgaaccccgcttccccaccagtactctctctcccttagagtttatgagttattcaaggaggagacttcttaaagacagcaacgcaattcttgtaacttgtgtaaatagccccatctttcagagtgataccatttctacatttgataatgcctgtattcctgtaggatgtatatagtttaggggattttttttttgtttggttttgttttttagaagtcaatatgtctggttttatttattgcttgaaaaagatcatttgaaaaaaataaa

SEQ ID NO: 805 - protein, 394 aa, Homo sapiens
MVTMEELREMDCSVLKRLMNRDENGGGAGGSGSHGTLGLPSGGKCLLLDCRPFLAHSAGYILGSVNVRCNTIVRRRAKGSVSLEQILPAEEEVRARLRSGLYSAVIVYDERSPRAESLREDSTVSLVVQALRRNAERTDICLLKGGYERFSSEYPEFCSKTKALAAIPPPVPPSATEPLDLDCSSCGTPLHDQEGPVEILPFLYLGSAYHAARRDMLDALGITALLNVSSDCPNHFEGHYQYKCIPVEDNHKADISSWFMEAIEYIDAVKDCRGRVLVHCQAGISRSATICLAYLMMKKRVRLEEAFEFVKQRRSIISPNFSFMGQLLQFESQVLATSCAAEAASPSGPLGERGKTPATPTSQFVFSFPVSVGVHSAPSSLPYLHSPITTSPSC

SEQ ID NO: 806 - protein, 302 aa, Homo sapiens
VRARLRSGLYSAVIVYDERSPRAESLREDSTVSLVVQALRRNAERTDICLLKGGYERFSSEYPEFCSKTKALAAIPPPVPPSATEPLDLGCSSCGTPLHDQGGPVEILPFLYLGSAYHAARRDMLDALGITALLNVSSDCPNHFEGHYQYKCIPVEDNHKADISSWFMEAIEYIDAVKDCRGRVLVHCQAGISRSATICLAYLMMKKRVRLEEAFEFVKQRRSIISPNFSFMGQLLQFESQVLATSCAAEAASPSGPLRERGKTPATPTSQFVFSFPVSVGVHSAPSSLPYLHSPITTSPSC

SEQ ID NO: 807 - DNA, 3829 bp, Homo sapiens
gtttgaaagtgtgtagcacctccaccttctctctctctctccctctccctctcctgccagccaagtgaagacatgcttacttccccttcaccttccttcatgatgtgggaagagtgctgcaacccagccctagccaacgccgcatgagagggagtgtgccgagggcttctgagaaggtttctctcacatctagaaagaagcgcttaagatgtggcagcccctcttcttcaagtggctcttgtcctgttgccctgggagttctcaaattgctgcagcagcctccacccagcctgaggatgacatcaatacacagaggaagaagagtcaggaaaagatgagagaagttacagactctcctgggcgaccccgagagcttaccattcctcagacttcttcacatggtgctaacagatttgttcctaaaagtaaagctctagaggccgtcaaattggcaatagaagccgggttccaccatattgattctgcacatgtttacaataatgaggagcaggttggactggccatccgaagcaagattgcagatggcagtgtgaagagagaagacatattctacacttcaaagctttggagcaattcccatcgaccagagttggtccgaccagccttggaaaggtcactgaaaaatcttcaattggactatgttgacctctatcttattcattttccagtgtctgtaaagccaggtgaggaagtgatcccaaaagatgaaaatggaaaaatactatttgacacagtggatctctgtgccacatgggaggccatggagaagtgtaaagatgcaggattggccaagtccatcggggtgtccaacttcaaccacaggctgctggagatgatcctcaacaagccagggctcaagtacaagcctgtctgcaaccaggtggaatgtcatccttacttcaaccagagaaaactgctggatttctgcaagtcaaaagacattgttctggttgcctatagtgctctgggatcccatcgagaagaaccatgggtggacccgaactccccggtgctcttggaggacccagtcctttgtgccttggcaaaaaagcacaagcgaaccccagccctgattgccctgcgctaccagctgcagcgtggggttgtggtcctggccaagagctacaatgagcagcgcatcagacagaacgtgcaggtgtttgaattccagttgacttcagaggagatgaaagccatagatggcctaaacagaaatgtgcgatatttgacccttgatatttttgctggcccccctaattatccattttctgatgaatattaacatggagggcattgcatgaggtctgccagaaggccctgcgtgtggatggtgacacagaggatggctctatgctggtgactggacacatcgcctctggttaaatctctcctgcttggcgacttcagtaagctacagctaagcccatcggccggaaaagaaagacaataattttgtttttcattttgaaaaaattaaatgctctctcctaaagattcttcacctactttggtctccataacttctatgttttctctccttctgacacactagtgcccccaaattgtgatttgcctatacgtttagggccgggattggaagatgttaacaaccatttaagattcatttctgcagtgggagtgggtggagtttcaccctctgggaaaggggcaggtgacaggtatttatcagtcagtgcctctctagctcttgtaggaagaagcacacgcaggatggagtctagaggatgagcgatattgaccagcaattcatgggctccctccagcagtgcgagggtcagagtttctggagccttgggaggaggcaaccctgtgagggggggttagggagatgggagggcaccaggaaaagtgattagaagtcaggtatgggaaggctaaataggacagagtcgagtacatctctgcttggaaaaacatatcaacaccctttttttttgatcattatatcttgttcataaaagaaaactttccacattgttttaacaaaccccacagctgagagtcaggcctgaatctttgatgtgtgcccattcacaacgttgaccctattggtttgtggtggggcaggacatcgaagatatcattgactaatcacattcccctgaatagctcatatttagaaaatattcttagattgtaaaaatgtactgttcatttgttatattcaatcttttaaatgttttatactttaaacaaggcatagttacaagtataaaacataaatatcccaaagccattatgcatggcactcaagattaaaatgggaaataatacatctaataaatcaaatgttccaagacttcaaatgtcttttggaaacaggctatgtaaaacagcacactggtttcaaactttggtaaattttaagaagaactcttacaaaggcatttaattcttatacataattttcaggggacctaagttaatcagctaatcatgaagacatgattttcgttttagaaaacacttttgaaaacttgggataatctcatgtcttaatgatcaaagcattatgagaaggacagtggttttttacctgggcacactttctaacacatttactctccactattcgtactctggtagccacgttaaccccatcagagattccttctcaagccatgtctcagagctgataggcatcccagcaagttttgcagctcacaatttttctgtaaattacttattctataaaattggaagaggccataaactttggagggccctagaccaattttttggattatttctggtctactctcattccgttgatgatcttagatattctctgcattaaatatcacctctaggctgagaaatccaccaaaaaatatttctagctcagcgttttcctccaaatcttcaatggaagatcataatgtgaactctgcatctccatgttaaagtttaatggacattcacatttagcatgtctcaaagaaatctcatgtaaaccatggccatcctgttctaccttaactttctgagtctatggaatgataatttcacatctcataaacttgactgatgtaagtgtcaagaaaagattgacattttgttaaaacttcgtagccaagtgtgtaacgcttaagcagactttcatatttcaaatctctatagcacgtgtaactcttttttcaagatgtgaaataatcattaggtcagtcatttgtaaatagtacagctgctgtgggctttttccagttcttcaccatccatttttataaaactcttattgttaaaaaaaaaaagttactcagaatttcataaagccaaacacctgatttcaggaacacttgagatgtaagaaaattttatagggacctccaatcactaattttcctattttttctctcaaagaaatgctgaagggaggaattcaggttgaatgaaaggaaatagtaacttacagccatatagagttataaagacttcttgtaaatgtgaacatatggtaaaatataaaaacatgtatttttgaaaaaatggattctactcattattttacttccatttaagatataaatgtagagaaataagtataattctaagctaatacgtacgcaatgtaggaagctgtaattactgaccaaaactatgtgaagtggagaaaacctggggaagtggatggttttagatgaaactgaagttaaattcatattgatttaaagtaaattgttataactttataaagtttttcatcatcaccacagcaatcacaaagagaataattatgaatatacgcaagaggaaatgagaagggaatccaaatgtcattaaaaaaaaa

SEQ ID NO: 808 - DNA, 781 bp, Homo sapiens
gcggcggagctgtgagccggcgactcgggtccctgaggtctggattctttctccgctactgagacacggcgggtaggtccacaggcagatccaactgggagttgaagtgtgagtgagagtgaagaggaaccagcaggcttccggagggttgtgtggtcagtgactcagagtgagaaggccctcgaagtcgtcgtccctctcatgcggtgccacgcccatggaccttcttgtctcgtcacggccataactagggaggaaggagggccgaggagtggaggggctcaggcgaagctggggtgctgttgggggtatccgagtcccagaagcacctggaaccccgacagaagattctggactccccagacgggaccaggagagggacggcatgagcgacacacacaaacacagaaccacacagccagtcccaggagcccagtaatggagagccccaaaaagaagaaccagcagctgaaagtcgggatcctacacctgggcagcagacagaagaagatcaggatacagctgagatcccagtgcgcgacatggaaggtgatctgcaagagctgcatcagtcaaacaccggggataaatctggatttgggttccggcgtcaaggtgaagataatacctaaagaggaacactgtaaaatgccagaagcaggtgaagagcaaccacaagtttaaatgaagacaagctgaaacaacgcaagctggttttatattagatatttgacttaaactatctcaataaagttttgcagctttcaccaaaaaaaaaaaa

SEQ ID NO: 809 - protein, 160 aa, Homo sapiens
MRCHAHGPSCLVTAITREEGGPRSGGAQAKLGCCWGYPSPRSTWNPDRRFWTPQTGPGEGRHERHTQTQNHTASPRSPVMESPKKKNQQLKVGILHLGSRQKKIRIQLRSQCATWKVICKSCISQTPGINLDLGSGVKVKIIPKEEHCKMPEAGEEQPQV

SEQ ID NO: 810 - DNA, 624 bp, Homo sapiens
  misc_feature 5, 74: n = A,T,C or G
atganaaggagatgacacaaaagttagatctcatcacaagtgatttggcagattaccagcagcccctcatgatnggcaccgggacagtcacgaggaagggctccaccttccggcccatggacacggatgccgaggaggcaggggtgagcaccgatgccggcggccactatgactgcccgcagcgggccggccgccacgagtacgcgctgcccctggcgcccccggagcccgagtacgccacgcccatcgtggagcggcacgtgctgcgcgcccacacgttctctgcgcagagcggctaccgcgtcccagggccccagcccggccacaaacactccctctcctcgggcggcttctcccccgtagcgggtgtgggcgcccaggacggagactatcaaaggccacacagcgcacagcctgcggacaggggctacgaccggcccaaagctgtcagcgccctcgccaccgaaagcggacaccctgactctcagaagcccccaacgcatcccgggacaagtgacagctattctgcccccagagactgcctcacacccctcaaccagacggccatgactgcccttttgtgaacacaatgtgaaagaagcctgctgtggtactgagcgtcgg

SEQ ID NO: 811 - DNA, 572 bp, Homo sapiens
agcgggctgtgaggacgctctgggccaggctgcagcgcgagcgttccgagctgctgggctctttcgaggatgttctgatacgcgcgtcggcctgcctggaggaggcggcccgggagcgcgacggcctggagcaggcgctgcggaggcgcgagagcgagcacgagagggaggtgcgcgctctgtacgaggagacggagcagcttcgggagcagagccggcgcccgccgagtcagaacttcgcccgcggggagcggagaagccgtctggagctggagctgcagatccgcgagcaggacctggaacgcgcgggcctgcggcagcgggagttagagcagcagctgcacgcccaggctgcggagcacctggaggcacaggcccagaactcccagctgtggcgggcgcacgaggcgctgcgaacgcagctggagggggcgcaggagcagatccgcaggctggagagcgaagcacgaggccgccaggagcaaacccaacgagacgtggtcgccgtctccaggaacatgcagaaagagaaagtcagcctgctacggcaactggagctgctcagggagctg

SEQ ID NO: 812 - DNA, 594 bp, Homo sapiens
  misc_feature 45: n = A,T,C or G
cggaagttggcgcagcgcggttgccaatggtcgctccctgatttnatgccgctcgtggtgttttgcgggctgccgtacagcggcaagagccggcgtgctgaagagttgcgcgtggcgctggctgccgagggccgcgcggtgtacgtggtggacgacgcagctgtcctgggcgcagaggacccagcggtgtacggcgattctgcccgtgagaaggcattgcgtggagctctgcgagcctccgtggaacggcgcctgagtcgccacgacgtggtcatcctggactcgcttaactacatcaaaggtttccgttacgagctctactgcctggcacgggcggcgcgcaccccgctctgcctggtctactgcgtacggcccggcggcccgatcgcgggacctcaggtggcgggcgcgaacgagaaccctggccggaacgtcagtgtgagttggcggccacgcgctgaggaggacgggagagcccaggcggcgggcagcagcgtcctcagggaactgcatactgcggactctgtagtaaatggaagtgcccaggccgacgtacccaaggaactggagcgagaagaatccggggctgcggag

SEQ ID NO: 813 - DNA, 561 bp, Homo sapiens
  misc_feature 121, 352, 368, 440, 445, 486, 497, 516, 528, 540, 550, 552: n = A,T,C or G
tctgacacacgagaccggttatcccatctccgcgcccctctgtgggtattacacagccactagatgaagccaaacattgttggaggtactgaaatcttagactccaccatgtgtccaggancccattgacgtcctctcttctgaaaactccgtgtggccctcgctctgcactgtcatgaggcggtgatggagctagatacccaccacggacaatgatcatcagtttggggttctctgggtctcacagggacgcacattctaggggtagcacgacactccccctgtagttgctccacacaaacgggatctctcatccaggcgatacgtctggtcctgtggcatgtggctctcnacgaaacaccagggangcattatgttggggacttcttggggctctgctggtctctgctccagacacgattaatccgaaatgtgttaantcgancacatgggtccacgtccaggacagctcccatcgaactctcnaggctctctanctcagggatgaaggaggtnaagtgatcgatnctcacaagcganagctctcgcncnatatctgcg

SEQ ID NO: 814 - DNA, 307 bp, Homo sapiens
  misc_feature 2, 6, 9, 24, 26, 45, 46, 63, 64, 73, 81, 82, 91, 95, 138,148, 151, 188, 205, 206, 212, 223, 229, 234, 242, 245, 248,252, 258, 262, 270, 278, 280, 301: n = A,T,C or G
cntcgnggngttggttgtgtgggntnttctcgggtgattgggtgnnattactggacccaaccnncgtggaaanggctgggnncgcggccgntctngcagaagtatcccgatttttttttttttttttttttttttggnggagggaaanttncagacatagctttattgctgactcctgcccccttcanagccctagtcacaggcnncagggntgttttgtaanttaaantttcnggaaaatnggngtntttntgcatncaanagaagggntgccaaangnggggtattgcttctgggtggnttaccc

SEQ ID NO: 815 - DNA, 784 bp, Homo sapiens
  misc_feature 596, 656, 727, 763, 768: n = A,T,C or G
ggcacgagatataatcagactcttactcctgtacttctagaaatgatgcaaacacttcaaggacccacaaatgtggaagatatgaatgcactgttaatcaaagatgctgtgtataatgctgttggattaagctgcttatgagctctttgacagtgttgattttgatcagtggtttaaaaaccagcttcttccagaattacaagtcattcacaataggtataagccattgcgacgcagggtgatttggctcatcggtcagtggatttctgtgaaattcaagtctgacttaagacccatgctttatgaagcaatctgtaacttgcttcaagatcaagatttagtggccgtattgaaacagctacaactttgaagttaactgttgatgattttgaatttagaacagatcagtttctaccgtatttggaaaccatgttcacactactttttcagttactgcagcaagttacagaatgtgacacaaagatgcatgttttgcatgtcctttcttgtgtgatcgaaagagtcaacatgcagatacgaccatatgtgggatgtttggtacaatatttgcccctcctttggaagcagaagtgaanaacacaatatgttgagatgtgctattttgaccacacttattcatcttggtcagggattangagcagacagcaagacctgtccctttcctgctccagttattcactgagtaccagatgtttcacagccttcncatgtttatttttctggaaaatgggttaaaaatatnggtangaacctttgggaaaac

SEQ ID NO: 816 - DNA, 813 bp, Homo sapiens
  misc_feature 740, 788, 790, 798, 811: n = A,T,C or G
ggcacgagcaggctgggaagaagtccttgcttctcaaggccacgtaccggccgcgtccttccacccttgccctttaaaccacagatgccaaatgatacgccaacagacactacattccccagcagctgctgccagagccctcttgtagcttctttattttctgtttctttccagctttcctaccctcctatccccccttgtgtttgggccacaattttgaaataatttttattataggtatgtgctgccaaagccagatttttataaggtaaaataaattaagaatttaaacagtaaaagccagtgtctcaaaatgtcagcattaaaatgtgaaggggacagcagggtgtgaaccggaaacacacattgccaaacagttgccaactgaactgctgcttctcatggtccgttcttttctttgcccttaaggtcaatgccagtgtccagacgagcagtgtagaaaagctccctgtgtggtttgtcgtgaggtctgcttgtatctcttcactggcgttagtttcattagctctttattctccttacgttcgagtgaatctgccaagaacactggtggatagtattatcctaacacttttggtttgggggcggggagggggcagggaatagtgagctggctttaccaccttcaggatctcgaattgggcgcttgaacctaagaaagattgtggacttatcaaaagtcaccgctcagtgttcgtcaagcatgtatttatgtgacnatcatactagggaggggatggttgggaattcttccatgtgcaaatttngncccgcaanaagcaaaactggngt

SEQ ID NO: 817 - DNA, 229 bp, Homo sapiens
  misc_feature 30, 57, 102, 112, 124, 222: n = A,T,C or G
gaaacttttacattaatgatttattaaaanaaacaactccttgtcccactccactgngctgcttgtaatctccatacatggcctccattttcaactgttttnttggtcacanagctccaaacanacacatttttttttccaggtaaaagctgtttttagtttgtagtacaaatgtgactgcatccaatactgacacattgttcctttggcccacagtcccantcaccac

SEQ ID NO: 818 - DNA, 781 bp, Homo sapiens
  misc_feature 355, 437, 539, 557, 569, 593, 608, 635, 636, 653, 654, 662,665, 674, 697, 699, 708, 724, 734, 743, 755, 763, 764, 769,775: n = A,T,C or G
ggcacgaggtgtgtgtgtgtgtgtgtgtgtaacacatgggcattggtccttccaggacaacttggttagggctccagggtggcctctcaggcaggaacaggcttttttcctcctgtcttttcctcacatcacgtcctgccccaggtcactgcataaataagtgctttggaaagtattcatctagaaagtaacataaatactgtacatagaaaagggttgccgccccttagccttcgcactgccccagagagctctccacatattgcacacggcctccccagccctgtggggtccaggcctggctgtgtctttggtagaagcttcagggacagttcctgggcagcccccacatctncaccctgctcccaaaggggagctctagggtagtcagtgggtaccagaagccttgctcggcctcgctggtggccttctaccanggatgctttcacaaggatgagacagaatcccaatggtatgcccctgcttggacactctgctcaaggtctgcatgtggcctgggaggagacaggcaggctganggcaggtggacaggtgantcctggccacanaaggcaggctcacacccttcacangaataggtggtttgngctgtcatctcggcccacggtctcctnntgcgccacccccccttnntgaatcgnaantcctcaaancccttaccaccacttgatgaccnancatttttanggcctggcttgaaggngggggccttnggccccccnaagggggaaatncccccggnngaatncccaanggggaa

SEQ ID NO: 819 - DNA, 199 bp, Homo sapiens
  misc_feature 2, 3, 4, 12, 20, 21, 22, 36, 37, 49, 76, 80, 83, 88, 157,165, 167, 177: n = A,T,C or G
cnnngtggaaanggctgggnnngcggccgttttcgnngtagtatcgcgnttttttttttttttttgtgggaggttntgcngtntttgnttgctctctcaaattccaggaattgacttatttaattaatgcctgcaacctgtgctagcaaatatttgnacaaaacnanttgtgttggngatgttcttttgggtcgggcag

SEQ ID NO: 820 - DNA, 211 bp, Homo sapiens
  misc_feature 1, 2, 3, 128, 131, 150, 157, 159, 166, 172, 174, 180, 182,185, 192, 202, 206: n = A,T,C or G
nnnggcacgaggagagagagagagagagagagagagagagagagagagagagagagagagagagagagagagagagagagagagagagagagagagagagagagagagagagagagagagagacagtnctntgtgtgtctctctgtctcnaagtacncnctgaggnatctgntntctgtntntgngtacacngtatctctcntggncatat

SEQ ID NO: 821 - DNA, 952 bp, Homo sapiens
  misc_feature 1, 2, 3, 29, 688, 692, 702, 742, 749, 767, 774, 786, 805,815, 828, 835, 840, 842, 854, 864, 868, 871, 879, 889, 890,895, 900, 904, 909, 912, 915, 926, 939, 944, 947: n = A,T,C or G
nnntcaggctcctggatgagccctgcganagagggtggcagcacggagagagctgctggaggcagcagagcaccaaggaaacatccagacatgcgcggcccggcccatccgctcccggaacagcaccaagacgaaatgggaaactacatgtccccaggttcgaggctgcaggggcagactctggtgtgaacaggggggatgtgaccacctaaggaaaaggtcacacctgtcttggtatcaggggctcaagagctctcaaaaatgtaaggggccgacagtcccctgccccaggcctgatcacaactccagggtcatgaggtcagagtaaagtgcagaggtttttaaacataaccaaaatttcaggagaggccaattcttacttgaaagagcaacaccctggggcgctgcttgccattacttcctcatctttagcaacacatttgcttttcaaggtgttccttgtggaaacacacatacacatagacacatgcccctcagatgtcccctgccccctgattagtagaatgtggggtttccacaatgagcagaaactgatccaattttggttaagtttgagaagccctctgaatttgggtggttggcccaatgtaaatacttccgcagagatggagggcattcaaaacaggttctgaaaggatccagcctatcttggactttgttctggaanccanggattcagcnttggccacctgtgccaggcttgcaaggcctggtgtgaacncccaaantggcagcaaaaacaacanacagccnctgcactttggntggaccaacgtttggcctnaacaaatctngcgggttgggatnttcttgntttcncncccaggggaccnaaaacccccntacntgnaataaccntttttttttnnaaccntttanccantgggnttnccnaaaaaacttgnccccttttttttnccaanggnaaaat

SEQ ID NO: 822 - DNA, 587 bp, Homo sapiens
  misc_feature 264, 335, 366, 371, 410, 413, 416, 424, 438, 464, 477, 478,497, 502, 509, 540, 575, 577, 581: n = A,T,C or G
ggcacgagaactagtctcgagttttttttttttttttttaacatttctgaattttattatttttagggaagacacgcagtttcacaagaaacaatgatttttctcaaacaatagaaaaaaaggtctttttgaaaaatccactgtcttagatgaaaagtctacccagcaagcactggggcagttctgagagtagaaaccagtgtggtggaagttacttataggaagttcagtgcagaggtctccacaagtcctgattagttctgnaaggctccattgggccagctcagggtaacagtgggaatgagctcacagacaaaggcaggcaccagttcctntgcccgggatgcaggctggctcactccccangcggntgcatcttgcttcagactcatcaaactgctgctgtccanctncgncatgactntgttgagaacatanaactctgctctctggctttgcttcanctcctggtgggcnnaattctgcttagccttctncactntgaaggntgggtctttaacttttggatttttttttccnggcagggggaaccatgaatggggtacatacccacncngggntttggc

SEQ ID NO: 823 - DNA, 264 bp, Homo sapiens
  misc_feature 1, 4, 7, 15, 17, 35, 38, 44, 53, 90, 105, 108, 115, 117,121, 126, 128, 158, 176, 178, 184, 201, 221, 227, 229, 233,239, 250: n = A,T,C or G
ntcnatncctactangncaaactgactccgccctnagncacctngtggtccanggctgcggagctgcgatacagccttccgcgggtctgntggaaccccgacctntcntggtgtntntccntcccncnccccaacccgccaagggcctgcctttcctnctgggcctttgccagcgntnggccanaccggggccaaaccggnccccgggcacattttaaccnagggcncncttntagaanaaaaccccggntgatgttataaagg

SEQ ID NO: 824 - DNA, 520 bp, Homo sapiens
  misc_feature 7, 15, 17, 39, 60, 81, 98, 101, 110, 111, 138, 145, 174,222, 250, 262, 311, 318, 332, 336, 345, 378, 406, 411, 414,421, 426, 439, 447, 448, 450, 474, 479, 489, 494, 498, 505,508, 510: n = A,T,C or G
tcaagcngcccccantntgatggatatctgcaaaattcnccctttcaccggccgcccgcngcatgtcttattatacaacanatccaacttccctaagnggntcacacatnntaaggtattgttaacaaaataggaaantctattngaactaacaatcatctctttgaatctgcntatcccattaaaagcattttcctcaatattcctcatatcggttatggncaatggatacccatctgagctggttganccctttaaattnattatacttaactttttgaaggctgttatacccaagggacaaacctaancaaccancagatatacttganggtntctcctgtnatttctcagattccaatataccattttgccttnacacctacagcccttaggggcatcctcnttccncanaacaaancattntcactaagacagnctggggtnntncaccaatggctaccaaacctctgnccgcnacccaccgcntaaanggcngaaattnccnanccacacgggt

SEQ ID NO: 825 - DNA, 2064 bp, Homo sapiens
cggtgcgctgagcgccggaggagcgtaggcagggcagcgctggcgccagtggcgacaggagccgcgcgaccggcaaaaatacacgggaggccgtcgccgaaaagagtccgcggtcctctctcgtaaacacactctcctccaccggcgcctccccctccgctctgcgcgccgcccggctgggcgcccgaggccgctccgactgctatgtgaccgcgaggctgcgggaggaaggggacagggaagaagaggctctcccgcgggagcccttgaggaccaagtttgcggccacttctgcaggcgtcccttcttagctctcgcccgcccctttctgcagcctaggcggcccgggttctcttctcttcctcgcgcgcccagccgcctcggttcccggcgaccatggtgacgatggaggagctgcgggagatggactgcagtgtgctcaaaaggctgatgaaccgggacgagaatggcggcggcgcgggcggcagcggcagccacggcaccctggggctgccgagcggcggcaagtgcctgctgctggactgcagaccgttcctggcgcacagcgcgggctacatcctaggttcggtcaacgtgcgctgtaacaccatcgtgcggcggcgggctaagggctccgtgagcctggagcagatcctgcccgccgaggaggaggtacgcgcccgcttgcgctccggcctctactcggcggtcatcgtctacgacgagcgcagcccgcgcgccgagagcctccgcgaggacagcaccgtgtcgctggtggtgcaggcgctgcgccgcaacgccgagcgcaccgacatctgcctgctcaaaggcggctatgagaggttttcctccgagtacccagaattctgttctaaaaccaaggccctggcagccatcccacccccggttccccccagtgccacagagcccttggacctgggctgcagctcctgtgggaccccactacacgaccaggggggtcctgtggagatccttcccttcctctacctcggcagtgcctaccatgctgcccggagagacatgctggacgccctgggcatcacggctctgttgaatgtctcctcggactgcccaaaccactttgaaggacactatcagtacaagtgcatcccagtggaagataaccacaaggccgacatcagctcctggttcatggaagccatagagtacatcgatgccgtgaaggactgccgtgggcgcgtgctggtgcactgccaggcgggcatctcgcggtcggccaccatctgcctggcctacctgatgatgaagaaacgggtgaggctggaggaggccttcgagttcgttaagcagcgccgcagcatcatctcgcccaacttcagcttcatggggcagctgctgcagttcgagtcccaggtgctggccacgtcctgtgctgcggaggctgctagcccctcgggacccctgcgggagcggggcaagacccccgccacccccacctcgcagttcgtcttcagctttccggtctccgtgggcgtgcactcggcccccagcagcctgccctacctgcacagccccatcaccacctctcccagctgttagagccgccctgggggccccagaaccagagctggctcccagcaagggtaggacgggccgcatgcgggcagaaagttgggactgagcagctgggagcaggcgaccgagctccttccccatcatttctccttggccaacgacgaggccagccagaatggcaataaggactccgaatacataataaaagcaaacagaacactccaacttagagcaataacggctgccgcagcagccagggaagaccttggtttggtttatgtgtcagtttcacttttccgatagaaatttcttacctcatttttttaagcagtaaggcttgaagtgatgaaacccacagatcctagcaaatgtgcccaaccagctttactaaagggggaggaagggagggcaaagggatgagaagacaagtttcccagaagtgcctggttctgtgtacttgtccctttgttgtcgttgttgtagttaaaggaatttcattttttaaaa

SEQ ID NO: 826 - DNA, 2109 bp, Homo sapiens
tggcgccagcggcgacaggagccgcgcgaccggcaaaaatacacgggaggccgtcgccgaaaagagtccgcggtcctctctcgtaaacacactctcctccaccggcgcctccccctccgctctgcgcgccgcccggctgggcgcccgaggccgctccgactgctatgtgaccgcgaggctgcgggaggaaggggacagggaagaagaggctctcccgcgggagcccttgaggaccaagtttgcggccacttctgcaggcgtcccttcttagctctcgcctgcccctttctgcagcctaggcggcccaggttctcttctcttcctcgcgcgcccagccgcctcggttcccggcgaccatggtgacgatggaggagctgcgggagatggactgcagtgtgctcaaaaggctgatgaaccgggacgagaatggcggcggcgcgggcggcagcggcagccacggcaccctggggctgccgagcggcggcaagtgcctgctgctggactgcagaccgttcctggcgcacagcgcgggctacatcctaggttcggtcaacgtgcgctgtaacaccatcgtgcggcggcgggctaagggctccgtgagcctggagcagatcctgcccgccgaggaggaggtacgcgcccgcttgcgctccggcctctactcggcggtcatcgtctacgacgagcgcagcccgcgcgccgagagcctccgcgaggacagcaccgtgtcgctggtggtgcaggcgctgcgccgcaacgccgagcgcaccgacatctgcctgctcaaaggcggctatgagaggttttcctccgagtacccagaattctgttctaaaaccaaggccctggcagccatcccacccccggttccccccagcgccacagagcccttggacctgggctgcagctcctgtgggaccccactacacgaccaggggggtcctgtggagatccttcccttcctctacctcggcagtgcctaccatgctgcccggagagacatgctggacgccctgggcatcacggctctgttgaatgtctcctcggactgcccaaaccactttgaaggacactatcagtacaagtgcatcccagtggaagataaccacaaggccgacatcagctcctggttcatggaagccatagagtacatcgatgccgtgaaggactgccgtgggcgcgtgctggtgcactgccaggcgggcatctcgcggtcggccaccatctgcctggcctacctgatgatgaagaaacgggtgaggctggaggaggccttcgagttcgttaagcagcgccgcagcatcatctcgcccaacttcagcttcatggggcagctgctgcagttcgagtcccaggtgctggccacgtcctgtgctgcggaggctgctagcccctcgggacccctgcgggagcggggcaagacccccgccacccccacctcgcagttcgtcttcagctttccggtctccgtgggcgtgcactcggcccccagcagcctgccctacctgcacagccccatcaccacctctcccagctgttagagccgccctgggggccccagaaccagagctggctcccagcaagggtaggacgggccgcatgcgggcagaaagttgggactgagcagctgggagcaggcgaccgagctccttccccatcatttctccttggccaacgacgaggccagccagaatggcaataaggactccgaatacataataaaagcaaacagaacactccaacttagagcaataacggctgccgcagcagccagggaagaccttggtttggtttatgtgtcagtttcacttttccgatagaaatttcttacctcatttttttaagcagtaaggcttgaagtgatgaaacccacagatcctagcaaatgtgcccaaccagctttactaaagggggaggaagggagggcaaagggatgagaagacaagtttcccagaagtgcctggttctgtgtacttgtccctttgttgtcgttgttgtagttaaaggaatttcattttttaaaagaaatcttcgaaggtgtggttttcatttctcagtcaccaacagatgaataattatgcttaataataaagtatttattaagacttt

SEQ ID NO: 827 - protein, 394 aa, Homo sapiens
MVTMEELREMDCSVLKRLMNRDENGGGAGGSGSHGTLGLPSGGKCLLLDCRPFLAHSAGYILGSVNVRCNTIVRRRAKGSVSLEQILPAEEEVRARLRSGLYSAVIVYDERSPRAESLREDSTVSLVVQALRRNAERTDICLLKGGYERFSSEYPEFCSKTKALAAIPPPVPPSATEPLDLGCSSCGTPLHDQGGPVEILPFLYLGSAYHAARRDMLDALGITALLNVSSDCPNHFEGHYQYKCIPVEDNHKADISSWFMEAIEYIDAVKDCRGRVLVHCQAGISRSATICLAYLMMKKRVRLEEAFEFVKQRRSIISPNFSFMGQLLQFESQVLATSCAAEAASPSGPLRERGKTPATPTSQFVFSFPVSVGVHSAPSSLPYLHSPITTSPSC

SEQ ID NO: 828 - DNA, 453 bp, Homo sapiens
ggatcatttaattgcatactctatgaccacgcacatgtaaagccccttctgcaaaagagacctaaaccagatgagaagtattattcatccagcatatggggaccaacatgtgatggcctcgatcggattgttgagcgctgtgacctgcctgaaatgcatgtgggtgattggatgctctttgaaaacatgggcgcttacactgttgctgctgcctctacgttcaatggcttccagaggccgacgatctactatgtgatgtcagggcctgcgtggcaactcatgcagcaattccagaaccccgacttcccacccgaagtagaggaacaggatgccagcaccctgcctgtgtcttgtgcctgggagagtgggatgaaacgccacagagcagcctgtgcttcggctagtattaatgtgtagatagcactctggtagctgttaactgcaagtttagct

SEQ ID NO: 829 - DNA, 452 bp, Homo sapiens
ctgggccacgaggacaccaccagcttggatcggcctcgccgtgtggaatactttgtagataagcaactccaagtaaaggctgtcacctgtgggccgtggaacacctacgtgtatgctgtggagaaagggaagagctgacatgtgtacgtatatgtatatgcaacacctgtgagacccccattcaggtcaaggaaaaccgttgcctgcaccccaagggccccatatttgcccctccccatcacagtcctgcccttcaccctcaagcacggtcctaaacttgtctgcactttagaaacacctggagagcattgaaaactctgctgcctaaggtcagcatcaatcaaaacaatgaaatcaatgaaacaatgaaaccagagcttctaggtgtgtggcctggatagtggtagattcaaagctccacccacctcatcccaggtacatttgatgtgcag

SEQ ID NO: 830 - DNA, 450 bp, Homo sapiens
ctgacccccctttgtccacagctaagatggcagcagaatgctatgtcactatatacagaaacaagacaacctgaagctaaatggatgccccctgcagagtcaacaggtccagcctcacagtgcacgccctgagctacagcctctcccaaaaggcatcttccccacagcctcaacgccgagcaaggagcatcaagggtttgtctcggttgttttgttctttttacaaactatagatatatacagttgaaaactcaggatttctagccaataaccatagttaccaccaccttacaaataaaaagaaaatgccagaaacatctttaaatgccttgtcacaccaacagcaaagtgcacagagtgaggagaacacgagagtgccttttcattttaaaaatgtttggaaatatgtacaactttgatacagtttcagggtgctccagacacccatgg

SEQ ID NO: 831 - DNA, 395 bp, Homo sapiens
ctctaaacccctccacattcccgcggtccttcagactgcccggagagcgcgctctgcctgccgcctgcctgcctgccactgagggttcccagcaccatgagggcctggatcttctttctcctttgcctggccgggagggccttggcagcccctcagcaagaagccctgcctgatgagacagaggtggtggaagaaactgtggcagaggtgactgaggtatctgtgggagctaatcctgtccaggtggaagtaggagaatttgatgatggtgcagaggaaaccgaagaggaggtggtggcggaaaatccctgccagaaccaccactgcaaacacggcaaggtgtgcgagctggatgagaacaacacccccatgtgcgtgtgccaggaccccaccag

SEQ ID NO: 832 - DNA, 291 bp, Homo sapiens
ctgactcttccatctgtgcaggttgactgaggtcattcctgagttgcagtatgttgagagggtaatatttctgtcttctctaactccccatactcccttgtcttccactctccacttaggagttttttgtgagttatgtccttgttgcttttgcctctttttctttctagccttgattgtgccagaagacaatgtccctattcacacactctttctgcttttctgtgggcaggaacatggaaggggtgctgatggacgtggactgtgagagcgtctaccccactgtgtagg

SEQ ID NO: 833 - DNA, 491 bp, Homo sapiens
ctgtagcttctgtgggacttccactgctcaggcgtcaggctcaggtagctgctggccgcgtacttgttgttgctttgtttggagggtgtggtggtctccactcccgccttgacggggctgctatctgccttccaggccactgtcacggcttccgggtagaagtcacttatgagacacaccagtgtggccttgttggcttgaagctcctcagaggagggcgggaacagagtgaccgagggggcagccttgggctgacctaggacggtcagcttggtccctccgccgaagaccacattattgccgtcccacgtctgacagtaatagtcagcctcatccatagcctgggtcccgctgatggtcagagtggctgtgttcccagagttggagccagagaagcgctcagggatccctgaagaccgcttattatcttgataaatgactaccacaggggactggcctggcttctgttgataccaacaagcagatacctg

SEQ ID NO: 834 - DNA, 308 bp, Homo sapiens
ctggtcgaggtccacgccgcggtaggtgaacttgcggaaggtccgcttcttcttctgctctacttctgccgtgctggagaacatcgaactgaacaagaagagtatgtattcccgtgtgccagagtgccaggtcaccacatactattatgttgggttcgcatatttgatgatgcgtcgttaccaggatgccatccgggtcttcgccaacatcctcctctacatccagaggaccaagagcatgttccagaggaccacgtacaagtatgagatgattaacaagcagaatgagcagatgcatgcgctgctgg

SEQ ID NO: 835 - DNA, 472 bp, Homo sapiens
  misc_feature 365, 402, 406: n = A,T,C or G
ctgacatgttaactgtgatgcataaaactcgatcttctgatggggagtaagtgcagaaggtagaaatctccgccccgcgggggcttatctgtactggtagttcatgctgtggtctgcgtttctgccatagccgccttgtgaggactggtaggagctgggagggccactgtagttctggccggaccccggggagttgtagttcgactgtgagtagcctccttgtttgccttggtatgaggagccgcccccagaacctccgccgtagcccccgtgtgaccctgggttgtaggatgccccgcctgagccgtagctgttcccgccgcttcggcctccactaccactgtagttgaatttgctctcgtagntgtagtcggatccgcccccgcccccgggagagttgtngganttcgagtaggagtagctgccttgtccatggttatagcctttctgcttgccctgtggagggccatag

SEQ ID NO: 836 - DNA, 354 bp, Homo sapiens
ccagtgcaaccttcagatagacacatggtgaccagagcccgccaggcttctgcaggtggcagtgtcgagcaagtgtaagatgtctgtgggaaggagaagctcctgaaatgaacgttctgcaaacagaaggctgaggggtcttccaggcatgtccagtcactaggagctgccaccggtgggcttgagtgccaggctctaggctttgtgcagaaagcacccggggcggggggcggtaagggagagcaaaatgggtctctctcaactgcagtcagtgctcctgggaacacggtctcacagacagcacatattctacgtcacagctctagggtttcaaggacttagccatccgacagg

SEQ ID NO: 837 - DNA, 318 bp, Homo sapiens
  misc_feature 282: n = A,T,C or G
ctgaaaatgaaggtaattaaaaccatggaggcgatcagcgaggttctccaggaccttaggtttgatgcggaatctgccgagtgatggcggctccccagggatgcgccgagggagatgggaaacggggcggatggcgcccagcccagccctaactgccagccacattgaagcggacattggcaaccgggtccccagccatgcgcagaaccgtgggtagcatgtgcttggtggtgatgtcctgcccacagacctcagacggcacattgatgcagaagagcgtantcatgcggtgcaggtagttggggtctccggacatgg

SEQ ID NO: 838 - DNA, 277 bp, Homo sapiens
ctgcgcgtcgccaaagtgacaggcggtgcggcctccaagctctctaagatccgagtcgtccggaaatccattgcccgtgttctcacagttattaaccagactcagaaagaaaacctcaggaaattctacaagggcaagaagtacaagcccctggacctgcggcctaagaaggcacgtgccatgcgccgccggctcaacaagcacgaggagaacctgaagaccaagaagcagcagcggaaggagcggctgtacccgctgcggaagtacgcggtcaagg

SEQ ID NO: 839 - DNA, 276 bp, Homo sapiens
ccaaggaatgcaggctgtactatctgcgaaatggagaacgtatttcagtgtcggcagcctccaagctgctgtccaacatgatgtgccagtaccggggcatgggcctctctatgggcagtatgatctgtggctgggataagaagggtcctggactctactacgtggatgaacatgggactcggctctcaggaaatatgttctccacgggtagtgggaacacttatgcctacggggtcatggacagtggctatcggcctaatcttagccctgaagagg

SEQ ID NO: 840 - DNA, 453 bp, Homo sapiens
  misc_feature 387: n = A,T,C or G
ccttctttgccatgaccaagctctttcagtccaatgatcccacactccgtcggatgtgctacttgaccatcaaggagatgtcttgcattgcagaggatgtcatcattgtcaccagcagcctaacaaaagacatgactgggaaagaagacaactaccggggcccggccgtgcgagccctctgccagatcactgatagcaccatgctgcaggctattgagcgctacatgaaacaagccattgtggacaaggtgcccagtgtctccagctctgccctcgtgtcttccttgcacctgctgaagtgcagctttgacgtggtcaagcgctgggtgaatgaggctcaggaggcagcatccagtgataacatcatggtccagtaccacgcactanggctcctgtaccatgtgcgtaagaatgaccgcctagccgtcaataagatgatcagcaaggtcgcac

SEQ ID NO: 841 - DNA, 142 bp, Homo sapiens
agcctctctagtggcagagcagctcacactccctccgctgggaacgatggcttctgcctagtacctatccttgtgtttctgatgcagtggtagcattggttcaagttctctcctgctgtggtcagagttgcttcgatgttgg

SEQ ID NO: 842 - DNA, 83 bp, Homo sapiens
cctaaaagcagccaccaattaagaaagcgttcaagctcaacacccactacctaaaaaatcccaaacatataactgaactcccc

SEQ ID NO: 843 - DNA, 482 bp, Homo sapiens
ccatcggtgtctggcagatgcggcacctcaagagcttctttgaagccaagaagcttgtgtagctgtcccaggcgtcacaacccatcctcccaggctgggggagaaaggacctcctggaactgacttcttctgtcaggaggactggtttccagccatacctgttctggaagggagaggggctggaggcacccacaggcacaagctgaaggcagcagcttggctaatactgagcaggtagtggggcaaattcctgccctctctctctggcctctgggccgtttggtagtaatcacccaggggctggtaaagcccctcctcttggcacctcagaatcacagtgttactgatcagggatgtgaggctgctgttgggggtggggggaggggaatgggcaggcaagccagtcttctgtcttcctttgctaacttagggttttgagcaggttgggggtatggtgcctgtcatacccacctgccaccctg

SEQ ID NO: 844 - DNA, 534 bp, Homo sapiens
  misc_feature 495, 508: n = A,T,C or G
ccagatttttcaagtttaaaggaggaaactgcttattggaaggaactttccttgaagtataagcaaagcttccaggaagctcgggatgagctagttgaattccaggaaggaagcagagaattagaagcagagttggaggcacaattagtacaggctgaacaaagaaatagagacttgcaggctgataaccaaagactgaaatatgaagcggaggcattaaaggagaagctagagcatcaatatgcacagagctataagcaggtctcagtgttagaagatgatttaagtcagactcgggccattaaggagcagttgcataagtatgtgagagagctggagcaggccaacgacgacctggagcgagccaaaagggcaacaatagtttcactggaagacttttgaacaaaggctaaaccaggccattgaacgaaatgcatttttagaaagttgaacttgatgaaaaaggaatctttgttggtctctgtacagaggttnaaggatgaagcangagatttaaggcaagaactagcagtt

SEQ ID NO: 845 - DNA, 175 bp, Homo sapiens
tcgacctgtggcaaatgtggctaccctgccaagcgcaagagaaagtataactggagtgccaaggctaaaagacgaaataccaccggaactggtcggatgaggcacctaaaaattgtataccgcagattcaggcatggattccgtgaaggaacaacacctaaacccaagagggcag

SEQ ID NO: 846 - DNA, 179 bp, Homo sapiens
cgcgtggacagttgcgaggggtctgtgtgaaggcacttgtcacgagcttcaatactgccgccgtcccaggatgggagaactgcgcagcaggaagggcacttctgaaagcacagtggagagatcgctggagcgggcgttctgggcaggaggaagcacagacggcaggcagggtggactgg

SEQ ID NO: 847 - DNA, 410 bp, Homo sapiens
ccaccaaaaccagtcacaagacctggagttgtctgtgcagatgtacgcccaagccgccctggatggagactcccagggattttttaacctggccctgctaatcgaggaaggtacgataatcccacaccatatcttggatttcttggaaattgactcaactctccattctaataacatctccattctccaggaactgtacgaaaggtgctggagccacagtaacgaggagtccttcagcccctgctccttggcctggctttacctgcacttgcggcttctctggggtgctatcctgcactcagccctgatctactttctgggaacctttctgctatccatattgatcgcctggactgtgcagtatttccagtctgtctcagcaagcgatccccctccaagaccatcccagg

SEQ ID NO: 848 - DNA, 557 bp, Homo sapiens
  misc_feature 508: n = A,T,C or G
cacgggcccccagccctgtgtcggccttgtctgtctcagctcaaccacagtctgacaccagagcccacttccatcctctctggtgtgaggcacagcgagggcagcatctggaggagctctgcagcctccacacctaccacgacctcccagggctgggctcaggaaaaaccagccactgctttacaggacagggggttgaagctgagccccgcctcacacccacccccatgcactcaaagattggattttacagctacttgcaattcaaaattcagaagaataaaaaatgggaacatacagaactctaaaagatagacatcagaaattgttaagttaagctttttcaaaaaaccagcaattccccagcgtagtcaagggtggacactgcacgctctggcatgatgggatggcgaccgggcaagctttcttcctcgagatgctctgctgcttgagagctattgctttgttaagatataaaaaggggtttctttttgtctttctgtaaggnggacttccagcttttgattgaaagtcctagggtgattctatttctgctg

SEQ ID NO: 849 - DNA, 525 bp, Homo sapiens
ctgatggtttggaaatgagagaactacagtggtgaagagaccaggaggcagctctcagtgaaaccaacattgcggatgcccttcgtgagccttctcagtcccagcaggaagcccacaacactggcctccccagcctgcctgctgacaacacctaggcttactttatctaaaatcagagtgtaccaggtctgtagcagaaaataatcaactaaatgtcagggacctatgagtcatttaaaacaaaagaggaagtgaaagccattaggcaagctatgtgctgggctgctaacgtagcccctgcagggaggggtcaggagcgcgctgcagtgagccttgggtctcgcaggcccagccctgctgcaaggagccagggcacccaggaaacatcagcacacacacacacagggaccctcccttcatgtcacttgttttgctgccctaaatggcttcttgcaccctaacccctgatcctggaagaaggcagagagactggcccgtacagagacctgcaattctacgcaagct

SEQ ID NO: 850 - DNA, 384 bp, Homo sapiens
cctcttggagcacatcctttactgcattgtggacagcgagtgtaagtcaagggatgtgctccagagttactttgacctcctgggggagctgatgaagttcaacgttgatgcattcaagagattcaataaatatatcaacaccgatgcaaagttccaggtattcctgaagcagatcaacagctccctggtggactccaacatgctggtgcgctgtgtcactctgtccctggaccgatttgaaaaccaggtggatatgaaagttgccgaggtactgtctgaatgccgcctgctcgcctacatatcccaggtgcccacgcagatgtccttcctcttccgcctcatcaacatcatccacgtgcagacgctgacccaggagaacgtcag

SEQ ID NO: 851 - DNA, 423 bp, Homo sapiens
ctcaggaaaaaccagccactgctttacaggacagggggttgaagctgagccccgcctcacacccacccccatgcactcaaagattggattttacagctacttgcaattcaaaattcagaagaataaaaaatgggaacatacagaactctaaaagatagacatcagaaattgttaagttaagctttttcaaaagatcagcaattccccagcgtagtcaagggtggacactgcacgctctggcatgatgggatggcgaccgggcaagctttcttcctcgagatgctctgctgcttgagagctattgctttgttaagatataaaaaggggtttctttttgtccttctgtaaggtggacttccagcttttgattgaaagtcctagggtgattctatttctgctgtgatttatctgctgaaagctcag

SEQ ID NO: 852 - DNA, 413 bp, Homo sapiens
ctgaaaacagtgggaggccagatgctggcatcttccagacgggagcatagccatggtcactctagccgatgtctcctggggctctcaggcggcaaggaccagatgcaccactactgtccaatcccagttttacttagagccacctccttttttggggccattagtccttatttcatgccagattttcactagcggctccctgttcttccaaatcaattcatgaccgtaagtaacataccatattccaaaaagagctcccccaagatgtgccgcatgatcaaaaaatttccatcccaggatcattcctgctgtatccatggcgataatggctttcagggcattccctgctgtgaacgtgaacatcggaaggaaaataatggcaagcctcccttctgggatcttagtgcagacag

SEQ ID NO: 853 - DNA, 288 bp, Homo sapiens
atctgtgagttctgagaggcatttaggccatgggacagggaggatcctgtctggccttcagtttccatccccaggatccacttggtctgtgagatgctagaactccctttcaacagaattcacttgtggctattagagctggaggcacccttagccacttcattcccctgatgggccctgactcttccccataatcactgaccagccttgacactccccttgcaaaccatcccagcactgcaccccaggcagccactcctagccttggcctttggcatgagatggggg

SEQ ID NO: 854 - DNA, 427 bp, Homo sapiens
ccaagtgagatcagccctcaagggcacatgccaagggcagagcagcccatgtagacagcttcggagggcatgggggtgtagggagttcggggtagctcctcattaactatttgttgggtgagtaaaggggtgaggctcagtggcaggtacctctgcaatgacaagctgcctcccctctatgtgtttagcatatgttattagaacgtgtccgacacccctaccgctgccatttgggccctttaataaagccaagtagagaaatctggcaataaaaggcaaatgtaagcatgctttctttaagacgcatcataaatggttttctttaagtgaatggaagagtttgacagagatacacctttgtaagaaaacattaagaatgctggctgactgtggtggctcacacctgtattcccagcactttgggagg

SEQ ID NO: 855 - DNA, 311 bp, Homo sapiens
ccagtattcctggaggatataacactgacatcagcagggttttcaatggcaacaattgcacgagctgccagcagaagcttctcccaggtcctcttgagatttatgatatagatgccatcacttttccttttatagatgtactgttccatctggaagtcaagattggtgccacctaagtgggttcctgctgcaaggaacttaaggacatcctcctccttcatttgcaggacatcaagggctccggacattgtgaaagtttccctttaagttacgacgggaatccagaacaacgccgtatggacccctctgca

SEQ ID NO: 856 - DNA, 328 bp, Homo sapiens
cctatggaagtttggtgctttgctccctgtgtttgcgaaacaggtatctcgtgatttcagaaaagcttgaggagattaagtctttccgggagctgacctgcctggatctttcctgttgcaagcttggagatgagcatgaacttctagaacatctcaccaatgaagccctgtctagtgtaactcagctccacctgaaggataattgtctatctgatgctggggtgcggaagatgacagcaccagttcgagtgatgaaaagaggtatccaatgcctgcatctgtgatctcagggttacatgataagtctaataatgttagattctcaagg

SEQ ID NO: 857 - DNA, 502 bp, Homo sapiens
  misc_feature 473: n = A,T,C or G
ctgaccggaccggtcatgcccgtccggaacgtctataagaaggagaaagctcgagtcatcactgaggaagagaagaatttcaaagccttcgctagtctccgtatggcccgtgccaacgcccggctcttcggcatacgggcaaaaagagccaaggaagccgcagaacaggatgttgaaaagaaaaaataaagccctcctggggacttggaatcagtcggcagtcatgctgggtctccacgtggtgtgtttcgtgggaacaactgggcctgggatggggcttcactgctgtgacttcctcctgccaggggatttggggctttcttgaaagacagtccaagccctggataatgctttactttctgtgttgaagcactgttggttgtttggttagtgactgatgtaaaacggttttcttgtggggaggttacagaggctgacttcagagtggacttgtgttttttctttttaaagangtaaggttgggctggtgctcacagacctc

SEQ ID NO: 858 - DNA, 411 bp, Homo sapiens
cggccgaggtccttaatagttaagttacagctaagaatgtcatgtcttgggttggaattttcatttttagcaccgttaatgtattcacttaaatctatgttagcaccttgtctccaggcagaacaacaaaccatccaaacattttaaacattgggggaaacacgaaggggagggttaaagacagaatccagtactgtggaaggagtggatttagatcacaagatccttgtcgatatccttctgcttgatgccgaagcagccggcccactcatccagggcgatgtacttgtcattgtccaggtcacaggtctcgaaaaagcgggtggtgcaatgctccatggggatgaggggagcacgcagtggagccagctcggtgtgggagaggtacccgtcaatggggtgctggtccag

SEQ ID NO: 859 - DNA, 232 bp, Homo sapiens
aaatcacagagggacttagtattccattaatgcaaatggaaacattaagttcatcatcagatgataaaaggaaaaaaaaaacctgatactcatctcaaaagacgcagagaagacatctgcataaatccagtacctattattatttcaaatttaaaaacttcttcttttttaagagatagggtatcactatgttgcccaggctgatcttgaactcttggcctcagatgatcct

SEQ ID NO: 860 - DNA, 235 bp, Homo sapiens
  misc_feature 230: n = A,T,C or G
tgcccagaaaggaaggggctattgcctcctcccagccacgttccctttcctcctctccctcctgtggattctcccatcagccatctggttctcctcttaaggccagttgaagatggtcccttacagcttcccaagttaggttagtgatgtgaaatgctcctgtccctggccctacctccttccctgtccccacccctgcataaggcagttgttggttttcttccccaatnctttt

SEQ ID NO: 861 - DNA, 457 bp, Homo sapiens
ccaaaggaaagttggaaggcaactgacagattctgccttttaggtacttgaactggcaggaaatgcatcaaaagacttaaaggtaaagcgtattacccctcgtcacttgcaacttgctattcgtggagatgaagaattggattctctcatcaaggctacaattgctggtggtggtatgttaacttctaacattttaaaaaatttcttcagaggaaggaattttttgctgcttttaattagtttttccaggagaggaaatttaagtatattttcaatgatggaagtatggttgtatcatgaaatttgatttatatgtataactcaatgaatttttacctcatacttgagctgcatgtttttaaagatacctttcaagttgaacagtatacactttcttggtttcaaatactgtgattttttaaaaaatcttaagtagaattaattcctgtcactcccc

SEQ ID NO: 862 - DNA, 561 bp, Homo sapiens
ccaggtcatcaccattggcaatgagcggttccggtgtccggaggcgctgttccagccttccttcctgggtatggaatcttgcggcatccacgagaccaccttcaactccatcatgaagtgtgacgtggacatccgcaaagacctgtacgccaacacggtgctgtcgggcggcaccaccatgtatccgggcattgccgacaggatgcagaaggagatcaccgccctggcgcccagcaccatgaagatcaagatcatcgcacccccagagcgcaagtactcggtgtggatcggtggctccatcctggcctcactgtccaccttccagcagatgtggattagcaagcaggagtacgacgagtcgggcccctccatcgtccaccgcaaatgcttctaaacggactcagcagatgcgtagcatttgctgcatgggttaattgagaatagaaatttgcccctggcaaatgcacacacctcatgctagcctcacgaaactggaataagccctcgaaaagaaattgtccttgaagcttgtatctgatatcagcactggattgtagaact

SEQ ID NO: 863 - DNA, 291 bp, Homo sapiens
ccatagctgtcccacctatggttttaaaaacagactgtaacttgatcttctgaaatccttctcgaaccacaactcgttctgttaaagaaatcctaggaaagaagtcctactgatattgtcgatagtctccaaaaggtgaggaaggtaactgagttgaaggcaactgggaggggtcttctgcaaactgaggaccattggaaaactgtgcagaggcaaatcttgtcaacaagataccagctccttcaattaaagctaggagaatgccacccattgcggctgacccaaccatgg

SEQ ID NO: 864 - DNA, 265 bp, Homo sapiens
ctgaacttttccacctggagtccttgggaataccggacgtgatcttcttttataggtccaatgatgtgacccagtcctgcagttctgggagatcaaccaccatccgcgtcaggtgcagtccacagaaaactgtccctggaggtttgctgctgccaggaacgtgctcagatgggacctgtgatggctgcaacttccacttcctgtgggagagcgcggctgcttgcccgctctgctcagtggctgactaccatgctatcgtcagcag

SEQ ID NO: 865 - DNA, 144 bp, Homo sapiens
cctccacctgcgttttgatctagatgagcatattgtccatctcccacagcttgctccggttccgcaggtacgcccgcccgtgctcgcgcgtcagcgacgcgatgtcctcgcgcatctcgttgatgaccgggagcagaaactgct

SEQ ID NO: 866 - DNA, 241 bp, Homo sapiens
ctggctgtaagtagcttcatagcaccagtctttgagaatgtcaagctctccagaaatcatggcctccaggacattggggatgatgtcgttctcgcactgtttcagaaaccggtccttgtcaaaggccgggtccacccggaggatctccgtgagcacctccgacatctctgtcttggagaacaggccccccagcaagtcggtgaccttgtccgtaagggcccgggatgcccggatgaacgcg

SEQ ID NO: 867 - DNA, 364 bp, Homo sapiens
cctgggcccgctgacttcagggtgaggccacagctactgcagcgctttttatttatttatttatttactgagatggagtcttgctctgtcacccaggctggagtgcagtggtgcaatctcggctcactgcaacctctgcctcctgggctgcagtgattctcctgcgttcaagtaattctcctgcctcggccttctgagtagttgggattacaggcatatgccaccacacttggctaatttttcgtatttttagtagaaatggggtttcaccatgttggcgaggctggtctcgaactcctgacctcaaggatcctcctgcctcggcctcctaaggtgctgggattgcaggtgtgagccaccacgt

SEQ ID NO: 868 - DNA, 472 bp, Homo sapiens
ccaccagtccacagatgtgactggtaagggatctagtaacagaggatggagttgggcagaatattatcctggatgatatgcacccagcactaggatacacctttcattagaatgaagagaacagacaaagccctcagaaaagatacaaaggcagagacattgattagaacattatctcataacagaggtggggccattacccaccattattgtaaaataactgtaactaaccaaaacacatacaggcttctttaatggagttaataaaactatggcacattgggaatcaggggcagaggtactgttcccagacggaaaactgggataaagggagccatgctgacagggccttattccagtctaggttgttagaaaggagccctagcccagaaatgacagcaaatagccataatcattatgtggggctgaaccagaggaagccaggctgagccaagaagctggaagtatcttg

SEQ ID NO: 869 - DNA, 368 bp, Homo sapiens
cctttcttgtaagtgaagaaaaaggaatgcagcaaagaagagttcgacattggagtccttagttccatcaggatcccattcgcagcctttagcatcatgtagaagcaaactgcacctatggctgagataggtgcaatgacctacaagattttgtgttttctagctgtccaggaaaagccatcttcagtcttgctgacagtcaaagagcaagtgaaaccatttccagcctaaactacataaaagcagccgaaccaatgattaaagacctctaaggctccataatcatcattaaatatgcccaaactcattgtgactttttattttatatacaggattaaaatcaacattaaatcatcttatttacatgg

SEQ ID NO: 870 - DNA, 411 bp, Homo sapiens
ggcgtgtccttggacttagagagtggggacgtccggcttcggagcgggagtgttcgttgtgccagcgactaaaaagagaattaaatatgggtgatgttgagaaaggcaagaagatttttattatgaagtgttcccagtgccacaccgttgaaaagggaggcaagcacaagactgggccaaatctccatggtctctttgggcgggagacaggtcaggcccctggatactcttacacagccgccaataagaacaaaggcatcatctggggagaggatacactgatggagtatttggagaatcccaagaagtacatccctggaacaaaaatgatctttgtcggcattaagaagaaggaagaaagggcagacttaatagcttatctcaaaaaagctactaatgagtaataattgg

SEQ ID NO: 871 - DNA, 385 bp, Homo sapiens
  misc_feature 13, 14, 15, 27, 108, 113, 159, 199, 215, 221, 229, 245, 258,260, 277, 284, 293, 309, 311, 325, 339, 350, 374, 377: n = A,T,C or G
ttttttttttttnnntttttttttttnaaagattcactttatttattcattctcctccaacattagcataattaaagccaaggaggaggagggggggtgaggtgaaanatganctggaggaccgcaataggggtaggtcccctgtggaaaaagggtcanaggccaaaggatgggagggggtcaggctggaactgaggancaggtgggggcacttntccctntaacactntcccctgttgaagctntttgtgacgggcnanctcaggccctgatgggngacttcncaggcgtanactttgtgtttctcgnantctgctttgctcancgtcagggtgctgntgaggctgtanggtgctgtccttgctgtcctgctntgngacactct

SEQ ID NO: 872 - DNA, 184 bp, Homo sapiens
  misc_feature 17: n = A,T,C or G
cttccttcggtctttantatttttgattgttatgtaaaactcgcttttattttaatattgatgtcagtatttcaactgctgtaaaattataaacttttatacttgggtaagtcccccaggggcgagttcctcgctctgggatgcaggcatgcttctcaccgtgcagagctgcacttggcctcag

SEQ ID NO: 873 - DNA, 397 bp, Homo sapiens
ctgtgggctctgaatggcgtccctttggctatccacgccgccggcgaccactgaattctgtggttctacaacagggtctggctgaccgaattgtcagagacgtccaggaattcatcgataaccccaagtggtacactgacagaggcattccttacagacgtggctacctgctttatgggccccctggttgcggaaagagcagttttatcacagccctggctggggaactggagcacagcatctgcctgctgagcctcacggactccagcctctctgatgaccgactcaaccacctgctgagcgtggccccgcagcagagcctggtactcctggaggatgtggatgctgcttttctcagtcgagacttggctgtggagaacccagtaaagtaccaagg

SEQ ID NO: 874 - DNA, 156 bp, Homo sapiens
ccagaagaacactatgccatggttgcactgaattttgtgcctactctagggcaaacagaattacaatcgaaggagttcctatctatctgtaaagaagagaacatgaaattctgttggcagaagcagcattttgaagaaataaaaggttcactgcag

SEQ ID NO: 875 - DNA, 512 bp, Homo sapiens
  misc_feature 504: n = A,T,C or G
ccagcatagcgaaaacttgtctctactaaaaatacaaaaattagtcaggcatggtggtgcacgtctgtaataccagcttctcaggaggctgaggcacgaggatcacttgaacccaggaggaggaggttgcagtgagctgagatcatgccagggcaacagaatgagactttgtttaaaaaaaaaaaaagtgacttgatttaagggaaaaaatgactggctatattcagtcagatatggcaaagagtctcaaggtgttaatgtgaatgattaaggtcttggggggggtgtcccctatcagactacaggtgtttagaggcacagaaaaaggtgcagttgggttcttaatgtgaaatgatgagaagcacaactccagtgtgtctctttgtgtagaatgtcagcagacaccccctgctagatgtgctggatcatgggaaagcatttccatttgttaatagattgttcagaagttttaatttatgatgggtgtggtggctcatgcctgtngtcccagc

SEQ ID NO: 876 - DNA, 199 bp, Homo sapiens
cctgtgccgggccccagggctggcagccaccagctcctcttccaggcatgggggacaccctgacaggatccggaagtctccatttacccaaaaatgcaagagccatgatcagtcatggcgacactgcaggcggtactgagtgaccatgtccagtccggctccgtccctcccacacgggggacaagcttctccgaggagg

SEQ ID NO: 877 - DNA, 486 bp, Homo sapiens
cgcgtgtgctgctcccttctgccaggagcccactgcttttgcacacaagctgcattttgcgcattgactcaggtcccagttgctcttcatatctccgtgaatgattggagtgcaaagatactgttctgagcgcttcccgttttctgaaagccatgtctctcaggcatgcctcgcttagttggcgatggggttggttgactgttttcgcttttttcttcttctcttttcttcttcttcttctttttttttcttttccttttctccccctcccaacgccactgacaagaaagcactaaagatgcaggttgtgcgatcaccctataacataaggaaaagaacaggagaggttaatttgaacgtgtaggctagtggtagagggagatggaggtctggggaaagagtctgtcaggtagacatctcttttaacatgtcccagtattcggttcaccagtatctctgcacctcactactacccttcactccttg

SEQ ID NO: 878 - DNA, 363 bp, Homo sapiens
cctgggcccgctgacttcagggtgaggccacagctactgcagcgctttttatttatttatttactgagatggagtcttgctctgtcacccaggctggagtgcagtggtgcaatctcggctcactgcaacctctgcctcctgggctgcagtgattctcctgcgttcaagtaattctcctgcctcggccttctgagtagttgggattacaggcatatgccaccacacttggctaatttttgtatttttagtagaaatggggtttcaccatgttggcgaggctggtctcgaactcctgacctcaaggatcctcctgcctcggcctcctaaggtgctgggattgcaggtgtgagccaccacgtctgg

SEQ ID NO: 879 - DNA, 365 bp, Homo sapiens
  misc_feature 357: n = A,T,C or G
gcccatgccagcgtgtggtcagcacgcacaacttgtggctgctgtccttcctgaggaggtggaatgggagcacagccatcacagacgataccctgggtggcactctcaccattacgctgcggaatctacaaccccatgatgcgggtctctaccagtgccagagcctccatggcagtgaggctgacaccctcaggaaggtcctggtggaggtgctggcagaccccctggatcaccggaatgctggagatctctggttccccggggagtctgagagcttcgaggatgcccatatggagcacagcatctccaggagcctcttggaaggagaaatccccttcccacccacttccatccttntcctcctg

SEQ ID NO: 880 - DNA, 431 bp, Homo sapiens
ccatctcccctcaccccaacctggataaaatgttacactacccactaatataaccactgacacacaaaccaagctccttccagtttaacattgaacatcaatctacatttccagtgaatgagctaaacttatgagcaggccattcaacttttcatgatacatttagtgctcagaaatggttgattccattagcctgccctatagctcaggtggcccaagatggagcctatcatcttccttggggtgtttggtgtttccaagtaggagcataaaaaggataccgtcccctaccccaccaccccatcccacataccctcactggcatccaggagaccagcagcaggctcaagaccccaaatgttgggcaccacaaataatgtgatatgtgccaggagcacggggggtaggggtgaaagagaaaaacaataagg

SEQ ID NO: 881 - DNA, 335 bp, Homo sapiens
ccacagaggtggtattacaaaatatacaaagtggtttctttctttacatttcatagaagaagcctgcctcatttccaaatgagagcactagaagcacaaatcatgcagaccatttactatataacttatgaaaaatgctgtacagggctgtgactatagatatagagtatttggctctgtttgggaattgatatctacaagggggagggtcaggggaggactgtctgatatcctgacttgctgggatggtggagaagctgggatgggggaggccccaatcttgctgcacggctacacccactcctcctttcctagataaggctggagcgcactgg

SEQ ID NO: 882 - DNA, 353 bp, Homo sapiens
atgcactcaaagattggattttacagctacttgcaattcaaaattcagaagaataaaaaatgggaacatacagaactctaaaagatagacatcagaaattgttaagttaagctttttcaaaaaatcagcaattccccagcgtagtcaagggtggacactgcacgctctggcatgatgggatggcgaccgggcaagctttcttcctcgagatgctctgctgcttgagagctattgctttgttaagatataaaaaggggtttctttttgtctttctgtaaggtggacttccagcttttgattgaaagtcctagggtgattctatttctgctgtgatttatctgctgaaagctcag

SEQ ID NO: 883 - DNA, 193 bp, Homo sapiens
ctggcagagaagaatggctacgtgactgtcagtgagatcaaagccagtcttaaatgggagaccgagcgagcgcggcaagtgccggaacacctgctgaaggaagggttggcgtggctggacttacaggccccaggggaggcccactactggctgccagctctcctcactgacctctactcccaggagattacag

SEQ ID NO: 884 - DNA, 461 bp, Homo sapiens
ctgaagaaccccatcagcgggctgttagaatatgcccagttcgctagtcaaacctgtgagttcaacatgatagagcagagtggaccaccccatgaacctcggtaagagaccacccaggaactgtacctagggttggggtcaggtgcttttgctcctgacgcagtcttggctgatttgtgagcagtgctgtttggtggcgcctatcttttcctccttcccttctgccttttagctaaattccccttgattggccctttctccagatattgagcagggaatatagaccttggaccagccagaatcttggctgaacaagggggaggttgactctgttggctgtaatgaagcttctttagaaatgattggttttggccgtacgcggtggctcatgcctgtaatcccagcactttttgaggccgaggcaggcatatcacgaggtcaggagtttgagaccagcctgg

SEQ ID NO: 885 - DNA, 266 bp, Homo sapiens
  misc_feature 14: n = A,T,C or G
ctgcaatgcttcancacacttcagcaccgaggctgggcatgaggggtccgtcaccaccacatcaaatacccctaaagcaatatctttgttatgggcacttgaatggtgctgcttcacagaggctgcaccaccagtcatgaggatctcagaccagagctccaggaagttctgctgttggtctgataccaagagtaccttcagattctggaaaggattttcacggggttgccagtccagaattctttgctcctcaaggctgtacccag

SEQ ID NO: 886 - DNA, 402 bp, Homo sapiens
cgcgtggtttccgattgtttgatagtatttactggagagatcatagaaacgactgtgaaccgatgtcacaccaggaaggttgttgagcatttcttcaacatcttcaattgtttcctttgtaacctgtaggtccccgatgtttaattttagagctccaattgctgttttacacaggatcactgcctcatcattacttttcaccttctcacgagtcttttccagaaaagtaagagccacattaggatcagtcatctgtctaactacatgaagaatgatttccacgagggacaaagggttcaccctgtgttcaaattcactgataaagttttcataaagcttaatgagaccatctccttgggcaaagcacggatcctgcacaaaatcaagcacctgaagtgtcag

SEQ ID NO: 887 - DNA, 342 bp, Homo sapiens
ccaaagcgagagcattggcagtgaattgcagacactcttccttggtcatgccttcccggtaggtagcatcaacatagccatagatgtaggagctcccggagcctccaatggcaaaggactgccttaccatcataccccccataggcactgagtacacctgccctccttcttgagggtcccagcctgcgatgatgattcccgccatcaggtcttcccggtatcggtaacacatctccttaaagaggctggctgctgtgtggaccagtggaggctcattcagttcaatgctgtggaaaccgagctggtaggtgacagcatcagctactgcctgggtatcagcag

SEQ ID NO: 888 - DNA, 228 bp, Homo sapiens
cgcgtcggccaaggctgctgctgttgctcctccaaagaaggttggcttcaaggccgtgtccagggacccacgagcagaggcactggggggcaagggatctccaagggggcaagggatccctaaagggggtagctcacaggtgagggggtttagggcccctctagggagcgcctgaggccatacattcaagagtgtccctggtgaggcccagggaagagccaggactgg

SEQ ID NO: 889 - DNA, 378 bp, Homo sapiens
ttggcttttctccccttctcatcctcctctcccctttcctcactgaaggctgtgagttgctttcaatgtgacaacactatgatgtcatttggaaggatttgccaggacagactgattctgagtcctgggtgccgtatgtgtatgcggcagtgttgtcaggcgatcttgtttgaagctctatgttgccataattaccatcaagtacacactgttggcaaaaggctaacacctgactttaggaaatgctgatttgagaacaaaaggaaaggtcttttttcactgcttaaagtggggtcactttgatacctttgcggtcatgtctgtgtctgatgagtgtagaatctctggatgtgcactgtcagtcatgtgtccaccagg

SEQ ID NO: 890 - DNA, 215 bp, Homo sapiens
ccattttggagtgtgtccattgggtagcaatgtggaaaccaccagggcctttgtggagaaaatggagggggttgagggagtcccaggaggggcttatttgagggcctttgccacttgctcataggcgagctcgatctcctcatcatctggacaggtggaagcgaattcttcccgggcgtaggcattgctcaagtaccgatgcactccccggaagg

SEQ ID NO: 891 - DNA, 412 bp, Homo sapiens
ctggtcaagttcaacagagccttggctgaccattctatggctcaggcacctcggctcattgatggcattgttcttaccaaatttgataccattgatgacaaggtgggagctgctatttctatgacgtacatcacaagcaaacccatcgtctttgtgggcaccggccagacctactgtgacctacgcagcctcaatgccaaggctgtggtggctgccctcatgaaggcttaacgtggctcttgcccaataccaaatcgccgctttccccacaagcccttcttcctgtatcaagaatgtgctttagagtatgtgagcaacctgtcttcagtgtagtacaaaggcagagtgagggggcttgtggctccttccaaccccactccccgttcagcacagccgccatctgcaaggaagg

SEQ ID NO: 892 - DNA, 472 bp, Homo sapiens
  misc_feature 85, 169, 171, 181, 201: n = A,T,C or G
ttttttttttttttttttttttaattactaccttttattctaatgtgaaccatggccctgaaagctgataacaagcttggctgancagagggaactaggggtcggcagaaaggattatgggtggaaaacattggctcttccttggggagtgatgctggggaaagggaananagtggctcancctgcaggtaaataggctanaaaagccaaggccaaaggctggaggggagaggacagtcagcatgtccagcctggggtctgggtgtagggttatcccttctccctgtgccttcccatctcgtccatgagcctaggtcttggagccttgtgttggaggctgctgtgatgtcaggaacggggatctgtctagcttttggccacttcctgggacctcacgcccctgttgacagatggagattgggcagcagggccttgctgcgttgttatctgctgttccgacttggtttgtctt

SEQ ID NO: 893 - DNA, 477 bp, Homo sapiens
  misc_feature 436, 447, 449: n = A,T,C or G
caaagattcactttatttattcattctcctccaacattagcataattaaagccaaggaggaggaggggggtgaggtgaaagatgagctggaggaccgcaataggggtaggtcccctgtggaaaaagggtcagaggccaaaggatgggagggggtcaggctggaactgaggagcaggtgggggcacttctccctctaacactctcccctgttgaagctctttgtgacgggcgagctcaggccctgatgggtgacttcgcaggcgtagactttgtgtttctcgtagtctgctttgctcagcgtcagggtgctgctgaggctgtaggtgctgtccttgctgtcctgctctgtgacactctcctgggagttacccgattggagggcgttatccaccttccactgtactttggcctctctgggatagaagttattcagcangcacacaacanangcagtttccagatttcaactgctcatca

SEQ ID NO: 894 - DNA, 289 bp, Homo sapiens
ctgtcttatggctatgatgagaaatcaaccggaggaatttccgtgcctggccccatgggtccctctggtcctcgtggtctccctggcccccctggtgcacctggtccccaaggcttccaaggtccccctggtgagcctggcgagcctggagcttcaggtcccatgggtccccgaggtcccccaggtccccctggaaagaatggagatgatggggaagctggaaaacctggtcgtcctggtgagcgtgggcctcctgggcctcagagtgctcgaggattgcccggaacag

SEQ ID NO: 895 - DNA, 179 bp, Homo sapiens
  misc_feature 14: n = A,T,C or G
ctggatgggtccanacaaagtggaatccctggaacctttaactgagcagtgaaggtcagtgcctcagagcctgagagatgaacaggaccagagagagaggtgggcaggcaggcacaaggttatgtcttcctcagactcggaaccctgctcttctccaccatccagacgttcagctacag

SEQ ID NO: 896 - DNA, 557 bp, Homo sapiens
  misc_feature 367: n = A,T,C or G
ccactcactgctgggacccaggcacctcccttctccatcctctctggattgtcagtaatgtcctggaacagaagcctgtgggatggccttgggcacggagaagccctggggtcagtgtcgtgcacggatggcggcagtgttgaacccaggaggctgaacccggcccaccacggaagatgagtgcatggcaaccgcctgccttcacgtcgctccacttggtaaccccaaggtctgggctgttctaggtattgcttcacgtgccccagcaagcccttaacaagagggcctggttccctgaagaaccaatcccaggaaggggccttgatccctccgccttgctgagagtgaaccctcgtctctcctcacnctccatttcatttctgggaattggggcttagtttcgaacctttggcaaggctgttcttactaatgcccaagcccctttacccctctccctataggttacacaggggagaccagggcctcggcagaagactgctgccacacttccgaatcattctgcttgccaaataggtcatcttcaccagttgactgac

SEQ ID NO: 897 - DNA, 495 bp, Homo sapiens
ctggaatctcctttgcaatcccatctgataagattaaaaagttcctcacggagtcccatgaccgacaggccaaaggaagagccatcaccaagaagaagtatattggtatccgaatgatgtcactcacgtccagcaaagccaaagagctgaaggaccggcaccgggacttcccagacgtgatctcaggagcgtatataattgaagtaattcctgataccccagcagaagctggtggtctcaaggaaaacgacgtcataatcagcatcaatggacagtccgtggtctccgccaatgatgtcagcgacgtcattaaaagggaaagcaccctgaacatggtggtccgcaggggtaatgaagatatcatgatcacagtgattcccgaagaaattgacccataggcagaggcatgagctggacttcatgtttccctcaaagactctcccgtggatgacggatgaggactctgggctgctggaataggacactcaagacttt

SEQ ID NO: 898 - DNA, 406 bp, Homo sapiens
ccacgactgcatgcccgcgcccgccaggtgatacctccgccggtgacccaggggctctgcgacacagggagtctgcatgtctaagtgctagacatgctcagctttgtggatacgcggactttgttgctgcttgcagtaaccttatgcctagcaacatgccaatctttacaagaggaaaccgtaagaaagggcccagccggagatagaggaccacgtggagaaaggggtccaccaggccccccaggcagagatggtgaagatggtcccacaggccctcctggtccacctggtcctcctggcccccctggtctcggtgggaactttgctgctcagtatgacggaaaaggagttggacttggccccggaccaatgggcttaatgggacctagaggcccacctggtgcag

SEQ ID NO: 899 - DNA, 277 bp, Homo sapiens
cctaagagtcattaaaaaattctccctttgtaacctcagtgctggggactgaggcgagccccctcaggtcgctggagtgcaccagtcttggggaagaggtgcaggagaagctgtgttttttatctccacacgcagtatgaagataaaattacatagtattacctagacatagacagtattacctaggtagatgcactgctcacctgcacccttcccagctctcatttttgttaggtgatttgggatagggatagtgttttggggtatggggggagtg

SEQ ID NO: 900 - DNA, 389 bp, Homo sapiens
ctgttttgaaatatttactgttattaaaacttgcttcaagggaaattgtgaatatatttccatatacaagcactagtaacagtaagtggccctgtcatccactaactcaggcaaagtaaagaatggcatttttgaaggacattttacctccccatatgatttgattggctaggactttcttctgtaaagtcataccttttcacatcttaagtttttacatttgccattttccaaatctcaattttgggcaagaacgatatagtcacaactatggggctgctttcaaaagcggggctccatttctactgtcagatcaatgtggtgctgtaaccatctttttatccctaccttcaagaacctccttatatgaagcctgtctttatccatca

SEQ ID NO: 901 - DNA, 453 bp, Homo sapiens
ctggagacacccacttgggtggagaagattttgacaaccgaatggtcaaccattttattgctgagtttaagcgcaagcataagaaggacatcagtgagaacaagagagctgtaagacgcctccgtactgcttgtgaacgtgctaagcgtaccctctcttccagcacccaggccagtattgagatcgattctctctatgaaggaatcgacttctatacctccattacccgtgcccgatttgaagaactgaatgctgacctgttccgtggcaccctggacccagtagagaaagcccttcgagatgccaaactagacaagtcacagattcatgatattgtcctggttggtggttctactcgtatccccaagattcagaagcttctccaagacttcttcaatggaaaagaactgaataagagcatcaaccctgatgaagctgttgcttatggtgcag

SEQ ID NO: 902 - DNA, 293 bp, Homo sapiens
cctccggccgcccccacggctcccatggcctcttcctgcgctaccgtgtggaggccctaaccctgcgtggcatcaatagcttccgccagtacaagtatgacctggtggcagtgggcaaggctttggagggcatgttccgcaagctcaaccacctcctggagcgcctgcaccagtccttcttcctctacttgctccccggcctctcccgcttcgtctccattggcctctacatgcccgctgtcggcttcttgctcctggtccttggtctcaaggctctggaactgtggatgcag

SEQ ID NO: 903 - DNA, 228 bp, Homo sapiens
ctggagactctgggccaggagaagctgaagctggaggcggagcttggcaacatgcaggggctggtggaggacttcaagaacaagtatgaggatgagatcaataagcgtacagagatggagaacgaatttgtcctcatcaagaaggatgtggatgaagcttacatgaacaaggtagagctggagtctcgcctggaagggctgaccgacgagatcaacttcctcaggcag

SEQ ID NO: 904 - DNA, 388 bp, Homo sapiens
ccaagcgctcagatcggcaaggggcaccagtcttgatctgcccagtgcacagccccacaaccaggtcagcgatgaaggtatcttcagtctcccccgaacgatgaggcaccatgacgccccaaccattggcctgggccagcttgcacgcctgaagagactcggtcacggagccaatctggttgactttgagcaggaggcagttgcaggacttctcgttcacggccttggcgatcctctttgggttggtcactgtgagatcatcccccactacctggattcctgcactggctgtgaacttctgccaagctccccagtcatcctggtcaaagggatcttcgatagacaccactgggtagtccttgatgaaggacttgtacaggtcagccag

SEQ ID NO: 905 - DNA, 272 bp, Homo sapiens
  misc_feature 14: n = A,T,C or G
ccggagcccacggnggtcatggctgccagagcgctctgcatgctggggctggtcctggccttgctgtcctccagctctgctgaggagtacgtgggcctgtctgcaaaccagtgtgccgtgccagccaaggacagggtggactgcggctacccccatgtcacccccaaggagtgcaacaaccggggctgctgctttgactccaggatccctggagtgccttggtgtttcaagcccctgcaggaagcagaatgcaccttctgaggcacctccag

SEQ ID NO: 906 - DNA, 525 bp, Homo sapiens
ctgtgcacccgagtgtcctttcccccctaagctggcacataggagcaaaagttcactaaccctgcagtggaaggcaccaattgacaacggttcaaaaatcaccaactaccttttagagtgggatgagggaaaagaaatagtggtttcagacagtgcttcttcgggagccagaagcactgcaagttgacaaagctttgtccggcaatggggtacacattcaggctggccgctcgaaacgacattggtaccagtggttatagccaagaggtggtgtgctacacattaggaaatatccctcagatgccttctgcaccaaggctggttcgagctggcatcacatgggtcacgttgcagtggagtaagccagaaggctgttcacccgaggaagtgatcacctacaccttggaaattcaggaggatgaaaatgataaccttttccacccaaaatacactggagaggatttaacctgtactgtgaaaaatctcaaaagaagcacacagtataaattcaggctgactgcttct

SEQ ID NO: 907 - DNA, 365 bp, Homo sapiens
gtaaattttaagtctttcagttttatagatacggaaaacaagggtgactctttaccacaggatgaataaagaactaagtaatatgggaaatgcagcaatttctggactagctgagccgattccttcctgtgagcacactgtaagctttcaagttctctgggcaggaattacagcacctgtcccctgcaatggccctgctgtgtgatgctcatcgcttcccttcgtgctggagcagtcccccaggtgtccatctcctatctttttgttccaatcttctgtgagttccagctagcaggctttacatctggggaaaggaaaaccaggggttttagctctgttctctgctcccatccttcgctcaccag

SEQ ID NO: 908 - DNA, 608 bp, Homo sapiens
  misc_feature 594: n = A,T,C or G
cggaggtgcctcagccatggcatggatccctctcttcctcggcgtccttgcttactgcacaggacgtgcggcctcctttgaggtgacccagccaccttcaatgtccgtgtccccaggacagacagccaagatcacctgcactggagataggttgggggatgaatatgtttgctggtatcaacagaagccaggccagtcccctgtattgataatatatttggataacaagcggccctcggggatccctgaccgattctctgcctacgcctctgggaacacagccactctgatcatcagcggggcccaagttatggatgaggcttattattactgtcaggcgtgggacggcagaactgtggtgttcggcgaagggaccaacctgaccgtcctaggtcagcccaaggctgccccctcggtcactctgttcccgccctcctctgaggagcttcaagccaacaaggccacactggtgtgtctcataagtgacttctacccgggagccgtgacagtggcctggaaggcagatagcagccccgtcaaggcgggagtggagaccaccacaccctccaaacaaagcaacaacaagtacgcggncagcagctatctga

SEQ ID NO: 909 - DNA, 513 bp, Homo sapiens
ctggtctcaaactcctcacctcaactgatccgcccaccttggcctcccaaagtgctgggattataggtgtgagccaccgtgcccaaagttaagtatttttgatcaagtgttttgtcttttgtgcaaggcatttgtggctctgtcatagcagaggaaaacaaaacatgcctatcaaatgaatcaagtccgacctcttctcatattgagcaactagaggtctaggaacatttcccctacctgtcattctcatctggcataccaggtgtacatactccttcttattctcctctgttaccaagatgttggccccattgggtttgaggtcacgaactccacaaactccaaactcttggacctcagtgctgaaggtgaggtcatagcctagtgtggagacatcattttccagcagataaaccagaccttggtagaagtggtaatcttcactctccatatctgtatatctgactgacttgcccaagatgtgtttgtaaaaggatcgagtaaagtagcact

SEQ ID NO: 910 - DNA, 272 bp, Homo sapiens
ccggagcccacggtggtcatggctgccagagcgctctgtatgctggggctggtcctggccttgctgtcctccagctctgctgaggagtacgtgggcctgtctgcaaaccagtgtgccgtgccagccaaggacagggtggactgcggctacccccatgtcacccccaaggagtgcaacaaccggggctgctgctttgactccaggatccctggagtgccttggtgtttcaagcccctgcaggaagcagaatgcaccttctgaggcacctccag

SEQ ID NO: 911 - DNA, 263 bp, Homo sapiens
cctgcaggtacaaattgaccaggctgttgacggctgcctccacgtcggtggaataattctgacgaatctgggagctcatggttggttggcaagaaggagctaaccacaaaaacggtgctggcaggtcccagaagcaggagatggccgagaagatggtcccggaggttgcaagcggagaggaaatcggagggcggtcggaggctggaagagagtccccggatctgttccgtccaaacactgttgaagcaagagacagacccgcg

SEQ ID NO: 912 - DNA, 470 bp, Homo sapiens
ctgtgagcaccagcccaaccctacctctttaaaaagaaaaaacacaagtccactctgaagtcagcctctgtaacctccccacaagaaaaccgttttacatcagtcactaaccaaacaaccaacagtgcttcaacacagaaagtaaagcattatccagggcttggactgtctttcaagaaagccccaaatcccctggcaggaggaagtcacagcagtgaagccccatcccaggcccagttgttcccacgaaacacaccacgtggagacccagcatgactgccgactgattccaagtccccaggagggctttattttttcttttcaacatcctgttctgcggcttccttggcactttttgcccgtatgccgaagagccgggcgttggcacgggccatacggagactagcgaaggctttgaaattcttctcttcctcagtgatgactcgagctttctccttcttatagacgtt

SEQ ID NO: 913 - DNA, 426 bp, Homo sapiens
cctggacaccataaggctggtgggctttcagaattgtgttaggggggcaggagtggcaggttcctgaatctcggtcaatatagtaaccagcaggacaagaggtgcaggaggagcccacatcagaggcttctagggcacagggacggcagtaggaggccacgccattcataacattggtgacattgatggagtagatcttggcaacgtcattggtgtacttcctgcttgcctcatgaaaagtggtcctctggaaggcccaggtgaggctcgtggtagtgttctcctcaatgatgtaggtataggactgtttgcctttggaacctttccacgtctccacaggagtgttggtcctagaattcacacccaccatgaagtagagctcacagttcacagaacagagggtctcaaagacaaatgtgattctgg

SEQ ID NO: 914 - DNA, 252 bp, Homo sapiens
ccaagctgggggtgcgcacatgtggaagaactggaggcccggtgtcatgagcagaggctgtaccctagatgcccgccccagtgccagccaacccaagacaggagaaagagtttggcagtttcgcctctgaggaatacatgcctggccctcctgtgaggtgaggcggtaggggggaaggcgcaggctccgaagtctgagggcttgccggagggggagtttctgagccttttgcatgggtgcatgccccctgcc

SEQ ID NO: 915 - DNA, 234 bp, Homo sapiens
ccactgggactttggcttcctgatgccgattgtggatttctgctgcaaagacagtgatgttgagccaggctgtttcctctctatccagaggttttgtagttttaataaaaccatcctctggattaatagtgaaaaatctgtcgaggtcagtgtgacgatcgatggaataccttatcgggctgttggcagcatcagggtctttggcatgcactctcccaaccacggtgccagcag

SEQ ID NO: 916 - DNA, 366 bp, Homo sapiens
  misc_feature 14, 338: n = A,T,C or G
ccattcagtctcanttcagaaaattccagaagaagaaggctgggtctcagtcctagtgggagaaccccctcctagtccacctgaaaacaccaaattcaaccatcatctgtcaagaaattaaaagaacaacaccctagagagaagtcatccacacacaatccacacacgcatagcaaacctccaatgcatgtacagaaacctgtgatatttatacccttgtaggaaggtatagacaatggaattgtgagtagcttaatctctatgtttctctccattttcattcctcctgcaactattttccttgatgttgtaataaaatgaagttacgatgagtgatnaaaaaaaaaaaaaaaaaaaaaaaaaaaa

SEQ ID NO: 917 - DNA, 492 bp, Homo sapiens
ggcacagcgagggcagcatctggaggagctctgcagcctccacacctaccacgacctcccagggctgagctcaggaaaaaccagccactgctttacaggacagggggttgaagctgagccccgcctcacacccacccccatgcactcaaagattggattttacagctacttgcaattcaaaattcagaagaataaaaaatgggaacatacagaactctaaaagatagacatcagaaattgttaagttaagctttttcaaaaaatcagcaattccccagcgtagtcaagggtggacactgcacgctctggcatgatgggatggcgaccgggcaagctttcttcctcgagatgctctgctgcttgagagctattgctttgttaagatataaaaaggggtttctttttgtctttctgtaaggtggtcttccagcttttgattgaaagtcctagggtgattctatttctgctgtgatttatctgctgaaagctcag

SEQ ID NO: 918 - DNA, 557 bp, Homo sapiens
  misc_feature 527: n = A,T,C or G
ctgctcctgggtaggcgtgcgggccatatcgtaggggtaggatactagccgctcgccgccgttcagatttgctcccagcacgaaggggttcttctccatccaggcaatgatggcccggacctccgtggataccgtggcatctggcgaaaggtagcgttcagggatgggcaagttattgttggggacccggtaggggacccatttcctctcctcagctccccagagcacagagttgagatccgggaaatcttcaaagatgtcaaagccctcctcagtccacagtcccagcgcccagttcccaaactctgagcccatctgcgctgccacctcgtagccatcagggttcagtgagggcaccaggtggatgcgtgtgtcctgcaccaggctgcgcacacgtgggttcccatcgcggtactctcggcacaggtactgcatgagcagcagcaacagctctcggcccagcacctcgttgccatggatcccagcagtgtagcggaactcgggctcccccagttcatgctccccanggttgtctgagatctccatggcatagatct

SEQ ID NO: 919 - DNA, 407 bp, Homo sapiens
ccttatgactacaacggcccacgagaaaaatatggaatcgttgattacatgatcgagcagtccgggcctccctccaaggagattctgaccctgaagcaggtccaggagttcctgaaggatggagacgatgtcatcatcatcggggtctttaagggggagagtgacccagcctaccagcaataccaggatgccgctaacaacctgagagaagattacaaatttcaccacactttcatcacagaaatagcaaagttcttgaaagtctcccaggggcagttggttgtaatgcagcctgagagattccagtctaagtatgagccccggagccacatgatggacgtccagggctccacccaggactcggccatcaaggacttcgtgctgaagtacgccctgcccctggttgg

SEQ ID NO: 920 - DNA, 340 bp, Homo sapiens
  misc_feature 14, 15, 304, 318, 319, 325: n = A,T,C or G
cctcttgggcagcnnagggccctgcctctgtttcatgatgcatgggtcatttgtcttgggtgtcctatcccatatggagaagaaaggggctctaagttctggctcttctttctttggggttctctgtacctgaggaaaccaggccctgggtgactttgcagatctgctcaccctcggtgagcaacagtgtcagccatgcaagcaggacagaatggtgactgggtgcccttggtgagctgtgtatttcctaggaggtagaaaactgtgggaaactgtggctaataaaaactaagtgtgagcgtcnaaaaaaaaaaaaannaaaaanaaaaaaagcttgtac

SEQ ID NO: 921 - DNA, 571 bp, Homo sapiens
ggaaaaataattttattcctcaaatgatcagcacattcagaagcaggacagaggagctctgatgacatctctgggggactcaaagcggccctcattttctggtattttcccaggtgattctcttccaacctgtgagtcctgctctctttcctcccatctgaagtttgagacatcctctgccacaaggaaagccaccaataccagcccaaagagccaccagagaggaaccaaaccacatgcatcaagttataggaaggatgcaagaagggaaattaggaaggaaagggaggagtttagttggcattctggggcatgctaacatgagggcgatggtctctctccaagtcgctggacatatcccttttctttccaggtgctccaactccaattgcagtttgggggaacgtgtgaaacttgttgaagtcctgcgtgtatgtgcccagcatgcaagtactcagattaccgcaccgcttagatctggggctgtccaggctggagccctctctctcttgctcctgctccagctcactggccttcatctgcacatagtcctgcaccagtgcagccagca

SEQ ID NO: 922 - DNA, 262 bp, Homo sapiens
  misc_feature 7, 12, 125, 198, 208, 214, 231, 253: n = A,T,C or G
gcccaanacatncaggtcacagcagattcgggcacgtgtggaagaaggttggatgatgtcatccacaaaccctcgcactgctgcagggaaagggttggcaaacttctcgatgtactctgcctgancagcttccacattctcatgccctttgaagatgatctccacagcgccctttgctcccatgactgcaatctctgnggtgggccangcatanttggtatcaccacaaangtgcttagagctcatgacatcntaggcacct

SEQ ID NO: 923 - DNA, 234 bp, Homo sapiens; identical to SEQ ID NO: 915

SEQ ID NO: 924 - DNA, 152 bp, Homo sapiens
ccaggattgacaggccatccattcacagccaggagatgctgggccagttcctccaagaggtctccgtcatggcagtgatgaaaacctaacagggtggccccctgtgccagctcaggtgactggagcccgagggcctgacaggttcccagcag

SEQ ID NO: 925 - DNA, 400 bp, Homo sapiens
caatatcatgccaaggacccaaacaacctcttcatggtgcgcttggcacagggcctgacacatttagggaagggcacccttaccctctgcccctaccacagcgaccggcagcttatgagccaggtggccgtggctggactgctcactgtgcttgtctctttcctggatgttcgaaacattattctaggcaaatcacactatgtattgtatgggctggtggctgccatgcagccccgaatgctggttacgtttgatgaggagctgcggccattgccagtgtctgtccgtgtgggccaggcagtggatgtggtgggccaggctggcaagccgaagactatcacagggttccagacgcatacaaccccagtgttgttggcccacggggaacgggcagaattgg

SEQ ID NO: 926 - DNA, 521 bp, Homo sapiens
ccacgtccctattttagaaatgagaggagtgactgcacacaggaaaaatgccacttttagcaattcaaagtggaaaaacttcttttatataaaaattatcccaactcccaccccttggctctcagtgttgcatctcccacagaggtaaagttgtgccattttcccacggctttaaacaaagcaaaacaaaaccaccaatcctaataacccccctccctgccccgtctccacgctgtgcggagagggctctagcccctcagtcggacttctccttctccttcatgtgcaagaagacgatgctgaagatgaagagccccagcatcatggagaaggcgctggcgtagtaggggtaggccgaggggatgaagcgctcatactgcgtgtgctggagtggccgcacggatacctgagtggaagagtacaggtgtgtgtagcctagccggttgtaatccactttaaactggaatacaccatacacgtcgggcaacttgaactgaacactgtatttgccacctttcttc

SEQ ID NO: 927 - DNA, 520 bp, Homo sapiens
ccaggctagtctcgaactcctgacctcaggtgatctgcctgcctcggcctcccaaagtgctgggattaccggcgtgagccaccatgcctggccttacattttttaaaatgagggaacaaatgaataaatgaccaccatgttaggggctggctctgaacagaattgtaaagtgggccaagcttgctctcaaggtcaccttaagcccacggttgctgtgtcctgccctctcagggtcatttcccagcctccaggcacctgttcacagaggctgcatctggcctcgcctccacccctccatcctaaggtgctccgctgacttagaacaggacagtcagggagagaatgtgtctcaggagggtggagtcagatgatcacggccttcctggcatctgaggggatacagcttcgggtagcaaagtgtgattttccctgagccccaggaaagcttggccttggtcagaatacattgaaccctgagggccagagagtccctggggcaagctctgagagggaggacctc

SEQ ID NO: 928 - DNA, 492 bp, Homo sapiens
ctgagctttcagcagataaatcacagcagaaatagaatcaccctaggactttcaatcaaaagctggaagtccaccttacagaaagacaaaaagaaacccctttttatatcttaacaaagcaatagctctcaagcagcagagcatctcgaggaagaaagcttgcccggtcgccatcccatcatgccagagcgtgcagtgtccacccttgactacgctggggaattgctgattttttgaaaaagcttaacttaacaatttctgatgtctatcttttagagttctgtatgttcccattttttattcttctgaattttgaattgcaagtagctgtaaaatccaatctctgagtgcatgggggtgggtgtgaggcggggctcagcttcaaccccctgtcctgtaaagcagtggctggtttttcctgagcccagccctgggaggtcgtggtaggtgtggaggctgcagagctcctccagatgctgccctcgctgtgcc

SEQ ID NO: 929 - DNA, 209 bp, Homo sapiens
ttttttcaccatctaacaaaggcactttattgcattaccattcacaattaacagtcaagaacaaataataataacaaataaaataacttttaagaggacaaggcattagaaataaaaaaggacactaataacatttgtaaaagcttgtactggatgtggttgcccccatttgtgtgtgtggttgtgtgtgtgtggttgtgtgttggtgg

SEQ ID NO: 930 - DNA, 617 bp, Homo sapiens
cgcgtcctttaacaagccccgttctcaaaaggctgggggtatttatataagaacttattccaaagtgactctaagatccatgttcccaagatctagtacgggctattcatggttctgaggcatgtccagcatgcaggcaaacttatctgttcaaattgaggtaaaacagacaaaaaacacttaatattaacagaagctacataattaaaactaaccttctgctgcttatttaagctaatgatgtattcttaccaaacagagaccctcaagtcaatcatttcttttgattttagttaccacccccaaattaagcctcttctttcaaagccattattagttaaaaaaaagttttaaaatgaagaaaaatattttttccagaacttgtattttgtaattagtgtgatgcaatttctttttatttttcaaacttagaaataactcatgtatggtactatttggtatttttttcagataccaaggaataccgacaggattcataaataggattttctgacactggcaggaaagtctgctaacgtttacaaaataccaaagactcttctttcaagcttcaaagatggctgagaattaacagttatgattagtttttcagtaca

SEQ ID NO: 931 - DNA, 521 bp, Homo sapiens
ccaacaaaattggtgaacacatggaagaacatggcatcaagtttataagacagttcgtaccaattaaagttgaacaaattgaagcagggacaccaggccgactcagagtagtagctcagtccaccaatagtgaggaaatcattgaaggagaatataatacggtgatgctggcaataggaagagatgcttgcacaagaaaaattggcttagaaaccgtaggggtgaagataaatgaaaagactggaaaaatacctgtcacagatgaagaacagaccaatgtgccttacatctatgccattggcgatatattggaggataaggtggagctcaccccagttgcaatccaggcaggaagattgctggctcagaggctctatgcaggttccactgtcaagtgtgactatgaaaatgttccaaccactgtatttactcctttggaatatggtgcttgtggcctttctgaggagaaagctgtggagaagtttggggaagaaaatattgaggtttaccatagttacttt

SEQ ID NO: 932 - DNA, 197 bp, Homo sapiens
ccttgtgaccaattacatatgattaaaattacttcccacattcacatccacagtactcgtccaccatttaacatctcaaccaaaacgttacacatgtgaaacaatcactaacaggcaaaaatactaaacctgtatatttggtattgcaaatacacttatgcatgagcaagcaagggattcacagtgagaatctacag

SEQ ID NO: 933 - DNA, 610 bp, Homo sapiens
cctcattttaacaatatcttttttttgctcttctgcttccaaaccttatttgccaatgtaatgcctttatataaagttcttatgatgaatgaaaaactttcaagtgctgttgcctcattaaatgcattatttattaatttaacttctagtactctcgataaagagccagtgaaatgagttattgagttccagggaaaaaaatgagaacataattttgaatttattatctctctatacacacacagttcataattggattacatataataataatatcaacaagtctatcagtatcgaagttggatactggtaatttctcatgtgaggctcttgtgtcacagtcagcatagatttctggagcatttgtctgttgatcttttggtggcctcaaacctcattaagtggtgtgggagatgctgtttctgccatgtgagaatgtgatggcagaattaacacaaccccaccaggggtacaacagagcactttacatccaaaggcagagagggacacagcaatgcagaattccagcacacttaagaggagcaccatgccatccagacccattaagatggacatagtcccatgacaattatttgagttgccatagtag

SEQ ID NO: 934 - DNA, 384 bp, Homo sapiens
ctgctaccaggggagcgagagctgactatcccagcctcggctaatgtattctacgccatggatggagcttcacacgatttcctcctgcggcagcggcgaaggtcctctactgctacacctggcgtcaccagtggcccgtctgcctcaggaactcctctgagtgagggaggagggggctcctttcccaggatcaaggccacagggaggaagattgcacgggcactgttctgaggaggaagccccgttggcttacagaagtcatggtgttcataccagatgtgggtagccatcctgaatggtggcaattatatcacattgagacagaaattcagaaagggagccagccaccctggggcagtgaagtgccactggtttaccaggcag

SEQ ID NO: 935 - DNA, 125 bp, Homo sapiens
  misc_feature 1, 23, 24: n = A,T,C or G
nttaaaattcatggaagtaatannacagtaataaaatatggatactatgaaaactgacacacagaaaaacataaccataaaatattgttccaggatacagatattaattaagagtgacttcgtta

SEQ ID NO: 936 - DNA, 546 bp, Homo sapiens
  misc_feature 519: n = A,T,C or G
gcccatgccagcgtgtggtcagcacgcacaacttgtggctgctgtccttcctgaggaggtggaatgggagcacagccatcacagacgataccctgggtggcactctcaccattacgctgcggaatctacaaccccatgatgcgggtctctaccagtgccagagcctccatggcagtgaggctgacaccctcaggaaggtcctggtggaggtgctggcaggttctcccgccaaggttctccccctgcctcgaggaggaaggggctggaggctcatggctctgcctcccatagaccccctggatcaccgggatgctggagatctctggttccccggggagtctgagagcttcgaggatgcccatgtggagcacagcatctccaggagcctcttggaaggagaaatccccttcccacccacttccatccttctcctcctggcctgcatctttctcatcaagattctagcagccagcgccctctgggctgcagcctggcatggacagaagccagggacacatncacccagtgaactggactgtggacctc

SEQ ID NO: 937 - DNA, 550 bp, Homo sapiens
caccaatcaaaattcctgttggtcctgagactttgggcagaatcatgaatgtcattggagaacctattgatgaaagaggtcccatcaaaaccaaacaatttgctcccattcatgctgaggctccagagttcatggaaatgagtgttgagcaggaaattctggtgactggtatcaaggttgtcgatctgctagctccctatgccaagggtggcaaaattgggctttttggtggtgctggagttggcaagactgtactgatcatggagttaatcaacaatgtcgccaaagcccatggtggttactctgtgtttgctggtgttggtgagaggacccgtgaaggcaatgatttataccatgaaatgattgaatctggtgttatcaacttaaaagatgccacctctaaggtagcgctggtatatggtcaaatgaatgaaccacctggtgctcgtgcccgggtagctctgactgggctgactgtggctgaatacttcagagaccaagaaggtcaagatgtactgctatttattgataacatctttcgcttcaccca

SEQ ID NO: 938 - DNA, 192 bp, Homo sapiens
  misc_feature 28, 63, 148, 153: n = A,T,C or G
tttttttttttttttttttttttttttnggaaaaagcccaaaaggcactttattggaggtctntgcctccattcacaggaaaaaggagctgggagccccatcctaagggtcccagcatcagcccactggagggcctggaacagtccancactntgtgggaaaggagtggggaggggaatgttttaaaaaaaa

SEQ ID NO: 939 - DNA, 337 bp, Homo sapiens
ccaaaatattggaacacacagaaccaaaccaggtgtgttctacacctgcatgagtgaaggatttccacgtagacacctaggaagagcccgcatgccctagactcactccagaggaaggattgatttgcaaccagaaagggagctgaaaaccacggagctccatggctcttcattcaaaagggaaaataatgattccacgttgctttttagagttcaaatcaacatctttctggataaatctattttttaacaatctttttattatttgtaaaagatataaaaacaactcccatcagtagcaatacaaggttatacattttaaccagattttctcagg

SEQ ID NO: 940 - DNA, 362 bp, Homo sapiens
cctgtccaaacgtgcgcaccaggaccgaggggagctccctcccaacacctgctaggaattgccaacttttaaatggatggggttttttatgggttgaacctctgttaatacttttgtacactctcactacagtttatatttttataggctattttctcaaggtgtttctagattccacatatctattttatataacaagttattatgttatgtgtgtgactcccttgtgtgtatctgtgccagcctcagcctccgagttgcttttccctctggccctgactctcactgactcaccgatgtggtgtgcaggcccacttcttaccccagatagcctcgggcgctgcctgtagtcatgccgacag

SEQ ID NO: 941 - DNA, 216 bp, Homo sapiens
ctggacatctttccagcccgggatacctaccatcctatgagcgagtaccccacctaccacacccatgggcgctatgtgccccctagcagtaccgatcgtagcccctatgagaaggtttctgcaggtaatggtggcagcagcctctcttacacaaacccagcagtggcagccacttctgccaacttgtaggggcatgtcgcccgctgagctgagtgg

SEQ ID NO: 942 - DNA, 324 bp, Homo sapiens
ctgattggcttcaggccccctacctctataaactctaccagcattactacttcctggaaggtcaaattgccatcctatatgtctgtggccttgcctctacagtcctctttggcctagtggcctcctcccttgtggattggctgggtcgcaagaattcttgtgtcctcttctccctgacttactcactatgctacttaaccaaactctctcaagactactttgtgctgctagtggggcgagcacttggtgggctgtccacagccctgctcttctcagccttcgaggccagggagcctcaaatcttcagtctctcagagaccacag

SEQ ID NO: 943 - DNA, 597 bp, Homo sapiens
ctgacaaaattcctgggttactaggtgtctttcagaagctgattgcatccaaagcaaatgaccaccaaggtttttatcttctaaacagtataatagagcacatgcctcctgaatcagttgaccaatataggaaacaaatcttcattctgctattccagagacttcagaattccaaaacaaccaagtttatcaagagttttttagtctttattaatttgtattgcataaaatatggggcactagcactacaagaaatatttgatggtatacaaccaaaaatgtttggaatggttttggaaaaaattattattcctgaaattcagaaggtatctggaaatgtagagaaaaagatctgtgcggttggcataaccaaattactaacagaatgtcccccaatgatggacactgagtataccaaactgtggactccattattacagtctttgattggtctttttgagttacccgaagatgataccattcctgatgaggaacattttattgacatagaagatacaccaggatatcagactgccttctcacagttggcatttgctgggaaaaaaagagcatgatcctgtaggtcaaatggtgaat

SEQ ID NO: 944 - DNA, 359 bp, Homo sapiens
ctggaagaggaaaaggagatactgcagaaagaactctctcaacttcaagctgcacaggagaagcagaaaacaggtactgttatggataccaaggtcgatgaattaacaactgagatcaaagaactgaaagaaactcttgaagaaaaaaccaaggaggcagatgaatacttggataagtactgttccttgcttataagccatgaaaagttagagaaagctaaagagatgttagagacacaagtggcccatctgtgttcacagcaatctaaacaagattcccgagggtctcctttgctaggtccagttgttccaggaccatctccaatcccttctgttactgaaaagaggttatcatctgg

SEQ ID NO: 945 - DNA, 367 bp, Homo sapiens
caggatctgaagtttggggtcgagcaggatgttgatatggtgtttgcgtcattcatccgcaaggcatctgatgtccatgaagttaggaaggtcctgggagagaagggaaagaacatcaagattatcagcaaaatcgggaatcatgagggggttcggaggtttgatgaaatcctggaggccagtgatgggatcatggtggctcgtggtgatctaggcattgagattcctgcagagaaggtcttccttgctcagaagatgatgattggacggtgcaaccgagctgggaagcctgtcatctgtgctactcagatgctggagagcatgatcaagaagccccgccccactcgggctgaaggcagtgatgtgg

SEQ ID NO: 946 - DNA, 335 bp, Homo sapiens
ccacagaggtggtattacaaaatatacaaagtggtttctttctttacatttcatagaagaagcctgcctcatttccaaatgagagcactagaagcacaaatcatgcagaccatttactatataacttatgaaaaatgctgtacagggctgtgactatagatatagagtatttggctctgtttgggaattgatatctacaagggggagggtcaggggaggactgtccgatatcctgacttgctgggatggtggagaagctgggatgggggaggccccaatcttgctgcacggctacacccactcctcctttcctagacaaggctggagcgcactgg

SEQ ID NO: 947 - DNA, 384 bp, Homo sapiens; identical to SEQ ID NO: 850

SEQ ID NO: 948 - DNA, 173 bp, Homo sapiens
ctgtggaggggacactgtctttgaggcatcactggttccacaaagggtaggggaaggtcttgagggaccaccccatgccctcattaatcaaccagaagcttggcctggagcagcagcggggattccagtagctgtgggcatacaggatgctagggcggccacaacccaggcag

SEQ ID NO: 949 - DNA, 211 bp, Homo sapiens
  misc_feature 13, 14: n = A,T,C or G
ccatccacgttgnnaaacagaataaaatggaaattcaccttgtcatctacccgacattggccttcctgtgccacggcatcatgggctgcctgtatggcctcattcttttcaaagcattttgctctgtcttcaggggacattttctctgtttcagaaagaaactgtttcagaactgatccatcctcaaatcccagtttgtcttgattattgg

SEQ ID NO: 950 - DNA, 382 bp, Homo sapiens
cctcatcgtgagtcaggacgtggtgaaagctgcagtggctgctgtgctctctccagaagaattcatggtcctgttggactctgtgcttcctgagagtgcccatcggctgaagtcaagcatcgggctgatcaatgaaaaggctgcagataagctgggatctacccagatcgtgaagatcctaactcaggacactcccgagttttttatagaccaaggccatgccaaggtggcccaactgatcgtgctggaagtgtttccctccagtgaagccctccgccctttgttcaccctgggcatcgaagccagctcggaagctcagttttacaccaaaggtgaccaacttatactcaacttgaataacatcagctctgatcggatccag

SEQ ID NO: 951 - DNA, 473 bp, Homo sapiens
  misc_feature 421, 456: n = A,T,C or G
cctctctgccaggcaaaggagggagctgcggctctttgacattaaaccagagcagcagagatacagccttttcctccctctccatgaactctggaaacagtacatcagggacctgtgcagtgggctcaagccagacacgcagccacagatgattcaggccaagctcttaaaggcagatcttcacggggctattatttcagtgacaaaatccaaatgcccctcttatgtgggtattacaggaatccttctacaggaaacaaagcacattttcaaaattatcaccaaagaagaccgcctgaaagttatccccaagctaaactgcgtgttcactgtggaaaccgatggctttatttcctacatttacgggagcaaattccagcttcggtcaagtgaacggtctgcgaagaagttcaaagcgaanggaacgattgacctgtgaattctttgccgtctaangcagttgtttatgacag

SEQ ID NO: 952 - DNA, 312 bp, Homo sapiens
ctgatgggtctcatagtcctctgggatggtgtcattgcagcggtaacgcaggttggcccagatgatgttctcctgggagaagcagaagacccccaagcggccaccccgcatggttgtgtccaagaccacgttgctgtcggccaccagctcagggccctcatagaatcgcaccctgatgtagcccacttggggccggtgctgcaggaaccaacgataggacttcttgtccttccaacccacgtttcgcgggtccttccacagcagccgcacctgagactctgtgtctcctgtatgccacagagcgttccgcag

SEQ ID NO: 953 - DNA, 397 bp, Homo sapiens
cgcgtccactgccgaccctcttggtttctgaaaccaacctttcttcctgctctcctctttaagagcaaaccccaacatgtataaggtcacagcaagtggtagccaggaaaagctgtgggacccctcatttgagtcacatccatatggcatggagaaagaaaacctctctgccagaaggaactgaactctggaagtcctaaggaaggtcaccatgatcagcagataggaaagcattgccaagggctgtccctcaagagcttagttttcttagggagaccagaaagacatcagatcctgactgccctgttttgctcaagttctgaaatgagtggcatgatgaagagctggtggagctgagggaaagagtcaaccatgtggggtggggtagtgaggaagg

SEQ ID NO: 954 - DNA, 304 bp, Homo sapiens
cctttgtaccgggccagcaactggaagggcacagtgtggaattccagggcctgcagagtcttcttctggaacagggcctcgtggctccagtacagggacaggttgaactgcagctcaaagagctcctcagggagcatcatggggaagcggatcttctccaccaagccctccacctcctcatgggaggcacgctccccccagctccaggtgtccacggccttcagtagggccagctcgctgggcaccgccaggtcgctcctgggcagcagcagttggagcaggtctgtggggacactgggccagg

SEQ ID NO: 955 - DNA, 156 bp, Homo sapiens
ctgtttcaactccctgccaagaaaaatgtagatgcaattctggaggagtatgcaaattgcaagaaatcgcagggaaatgttgataataaggaatatgcggtcaatgaagttgtggcaggaataaaagaatatttcaatgtgatgttgggcactcag

SEQ ID NO: 956 - DNA, 543 bp, Homo sapiens
ctttcatctgaccatccatatccaatgttctcatttaaacattacccagcatcattgtttataaccagaaactctggtccttctgtctggtggcacttagagtcttttgtgccataatgcagcagtatggagggaggattttatggagaaatggggatagtcttcatgaccacaaataaataaaggaaaactaagctgcattgtgggttctgaaaaggttattatacttcttaacaattctttttttcagggacttttctagctgtatgactgttacttgaccttctttgaaaagcattcccaaaatgctctattttagatagattaacattaaccaacataattttttttagatcgagtcagcataaatttctaagtcagcctctagtcgtggttcatctctttcacctgcattttatttggtgtttgtctgaagaaaggaaagaggaaagcaaatacgaattgtactatttgtaccaaatctttgggattcattggcaaataatttcagtgtggtgtattattaaatagaaaaaaaaaatt

SEQ ID NO: 957 - DNA, 528 bp, Homo sapiens
ctgtgatcaagatgtattaaaagaatatgaaagagcatctgggttattctagaagttctgtgatcaaaacatattaaaaaaaattaaagcgcatctgggttattctagaagttcctgggctttatacttggatatttacagaggaagttgaacttcaagttctgccactcttcaaaatgggtgacaggagaggacgtgataggacagttaaaaaaaaattgatagtcattctctgatggagtgaagcaagctttgtcaaccatcaacaaatatgacttcattggtcacaagccctgcagagatccaacaagatttgagttttaaatacagaacatatttcaaacagaaccagcagagtgctgatgtatgaatggaattgattgctgaaggcagagagtataaagaatctcaagaaacttttagtgccattttcatttaataagccattggtatagcaacctaaaaaccttggctgtgatgacaccaggatgtgtttatggaattgctgcaggagaacacaattggcag

SEQ ID NO: 958 - DNA, 451 bp, Homo sapiens
ctgtctgaccatggggaccttctgtctgaagaggagctggatgaatgagactctgggaatcatctacacaggaccaaacccaacaggcgccctggcaccggggaggcgggtagttgtactctgcttgtacagtccttgagcccagtttacagatctggagagcaggaggccaggacaaggacaaaggctggaggatggagtaggacccaggggctctgccatcctaggcatcattcaaggtcttttatgaagactttacagatgtcctctgtaagtagcatcgagagtggagttcagctcctttctctacttttttttggtctgatggcacatatttattgttctgtggtctaatcacagtgtttctaaatgtaaaaagtgcatatgttggtgtagctagtcccgcgacattgagctcctctgcatgaagacactgggctcctgcatccag

SEQ ID NO: 959 - DNA, 158 bp, Homo sapiens
ccagaccaaggctgctggacctatgggaatattcgggtgtctgtagaggatgtgactgtcctggtggactacacagtacggaagttctgcatccagcaggtgggcgacatgaccaacagaaagccacagcgcctcatcactcagttccactttaccag

SEQ ID NO: 960 - DNA, 235 bp, Homo sapiens
ctgagcagggaatccggccggaggaaggagcagcttaccgactgcgggtgttcaccacaggccaggccctaatatgcacccactagtttagctcagactcctctctacatatgaatggcaaaggcacttttgatatacactgtaaaatacactgtattttagaatcggaatctattttctaatgttcccctcaagggctgagtggcaggaaggttgaggatgcaggactttgcag

SEQ ID NO: 961 - DNA, 375 bp, Homo sapiens
cctggaaagaaaagggatatgtccagcgacttggagagagaccatcgccctcatgttagcatgccccagaatgccaactaaactcctccctttccttcctaatttcccttcttgcatccttcctataacttgatgcatgtggtttggttcctctctggtggctctttgggctggtattggtggctttccttgtggcagaggatgtctcaaacttcagatgggaggaaagagagcaggactcacaggttggaagagaatcacctgggaaaataccagaaaatgagggccgctttgagtcccccagagatgtcatcagagctcctctgtcctgcttctgaatgtgctgatcatttgaggaataaaattatttttccc

SEQ ID NO: 962 - DNA, 409 bp, Homo sapiens
  misc_feature 14, 26, 73, 74, 81, 103: n = A,T,C or G
ctggggaggccccncgggcctctcangtggacaggtccaggcattggttgaagctggatgaagctggggcctnngctcctnctcatcaaatacagatcactgngaccctgtcctcctccatggtgctggtctcctcggccccactgcccctgcttctgctttcttcctccacctcctcctcccccagctccatgtccagctcgttgcctgcctctgagggtgtgtaggtggagccactgatggaacggcagctaaagaagacgattcgcttgagccgcttgttgtagaagaagtagttgaaggaccagaggctaccatcctccccgaagggatctgagtccaagtctgggttatagctgtagatgtcacattcagccaggcagatctcctcgtccaccgcgttccacag

SEQ ID NO: 963 - DNA, 163 bp, Homo sapiens
gccatggcgtcctatttcgatgaacacgactgcgagccgtcggaccctgagcaggagacgcgaaccaacatgctgctggagctcgcaaggtcacttttcaataggatggactttgaagacttggggttggtagtagattgggaccaccacctgcctccaccag

SEQ ID NO: 964 - DNA, 344 bp, Homo sapiens
ccactggctgagttattggcctggcaggtatagagtccgctgttcttctcagtgatgttggagataaagagctcttgtgtgtgttgctggatgttcccatcaatcagccaagaatactgtgcaggtgggttagaggctgcatggcaggagaggctgaggttcacccctggacggtaataggtgtatgagggggaaatggtggggtcgtctgggccatagaggacattcaggatgactgggtcgctgtggtcaacacttaattcgttctggattccacactcatagggtcctacatcattccttgtgacactgagtagagtgagggtcctgttgtcattggacag

SEQ ID NO: 965 - DNA, 461 bp, Homo sapiens
ctgagctttcagcagataaatcacagcagaaatagaatcaccctaggactttcaatcaaaagctggaagtccaccttacagaaagacaaaaagaaacccctttttatatcttaacaaagcaatagctctcaagcagcagagcatctcgaggaaggaagcttgcccggtcgccatcccatcatgccagagcgtgcagtgtccacccttgactacgctggggaattgctgattttttgaaaaagcttaacttaacaatttctgatgtctatcttttagagttctgtatgttcccattttttattcttctgaattttgaattgcaagtagctgtaaaatccaatctttgagtgcatgggggtgggtgtgaggcggggctcagcttcaaccccctgtcctgtaaagcagtggctggtttttcctgagcccagccctgggaggtcgtggtaggtgtggaggctgca

SEQ ID NO: 966 - DNA, 246 bp, Homo sapiens
cctttcacagacactaccattgagtgggttgatgcaggttgcagccttcagtccccgagtactgggttctgataaaattccacagaatccagcatcactgggctcagacggcatccactgtagtaaactatttgtaaatggggacatatcttcccagcaccagtaggacacattgatcttccgaaggccgacccatggggttaaggtgagcttggacatgctctgagatgactgcattattcgcag

SEQ ID NO: 967 - DNA, 244 bp, Homo sapiens
ctggagcattggcagggacagtcagaaaggagacaagtgaaaacggtcagatggacacaggcggaggagaaaagacagagggagagagaccatcgggaacaatcagaggggccgagacgatcagaaaagggtcagcccgagacaggctgagccagagtttctagaagcagtttccaattcaacggctcgctttgagggccaacgtgtcctaggccgaggctgcagaagcgctcacacactcacg

SEQ ID NO: 968 - DNA, 436 bp, Homo sapiens
ccaaagtctttaccctatttaaccccttgtatatttctgactgctcactgttcatattataggggaccagatttgtaatatagaattctccataacatgaatgaaattaatgctgtccaagccagcatggtggcttcatattaagtagtaacagaagtctgaacaattggataaatttgacttccaagacagctaaacttttcaactgcaattttaaaaactacactacactgttatagttaatctgacaaaaatgtcctcaaagagtactttattttatttaaagcatctgtttaattcaacctttaataattttgcaaagaagggtacgtgtgtattttaatatagcctgacctgaatttatatgtttttagctttagtatttaactttttgtaacaaataaaccttttttaaaacaagtttaaaaaagaaaaa

SEQ ID NO: 969 - DNA, 383 bp, Homo sapiens
ctggctcccttgtctccagggctttggaggatcagggtagggagggctctgtctctaagccaggtgtcaggatcagaatcatgggtagaaggtgccattcagctcacagccgcacccagaatcctttgcagccctccttctttatttttttcccattgcattctgggagtccacatctggctttctcagccactgttcatcaccaggggttttaggaggaaggcttggctcctgtcttcccagacccaccatgcctggagaggtcaggatggaactacctcattcggcgaattagccccaaattgaacgctgaatcgtgtcccatgagatcaggcgccatctgtaaagtctcctctggaaatgccaatccatccttcccccag

SEQ ID NO: 970 - DNA, 543 bp, Homo sapiens
ctgtagcttttgtgggacttccactgctcaggcgtcaggctcaggtagctgctggccgcgtacttgttgttgctttgtttggagggtgtggtggtctccactcccgccttgacggggctgctatctgccttccaggccactgtcacggctcccgggtagaagtcacttatgagacacaccagtgtggccttgttggcttgaagctcctcagaggagggcgggaacagagtgaccgagggggcagccttgggctgacctaggacggtcagcctggtccctccgccgaacaccgaagtgctactgtttgtatatgagctgcagtaataatcagcctcgtcctcagcctggagcccagagatggtcagggaggccgtgttgccagacttggagccagagaagcgattagaaacccctgagggccgatcagtgacatcataaatcatgagtttgggggctttgcctgggtgctgttggtaccaggagacatagttataaaaaccaacgtcactgctggttccagtgcaggagatggtgatcgactgt

SEQ ID NO: 971 - DNA, 416 bp, Homo sapiens
ccagactgacttcaaaaaattaatgtgtatccagggacattttaaaaacctgtacacagtgtttattgtggttaggaagcaatttcccaatgtacctataagaaatgtgcatcaagccagcctgaccaacatggtgaaaccccatctgtactaaacataaaaaaattagcctggcatggtggtgtacgcctgtaatcccagtgacttgggaggctgaggcaggagaatcgcttgaacccgggaggcggaggttgcagtgagctaagatcgcaccactgtactccagcctgggcaacagcgagactccatctcaaaaaaaaaggaaatgtgtatcaagaacatgattatccaggggtattttctaattcagatcatcaaactgattatatagaagagttggctttaaaatgtttgca

SEQ ID NO: 972 - DNA, 242 bp, Homo sapiens
ccaaaaatcccaaaacatcattttcaatcagtagagaagtgcttagggttgaaaattgatttcatttgctactgaatttggtaaatcctgggtaacttttatcaagatgaagacattttaccctacctactctagaaatatacaacaatgttatattttacactccttggaaacatttgaggaaaaaaatgcaatttgcacttcactttgttggaatatcccatagcactcaataaactcag

SEQ ID NO: 973 - DNA, 347 bp, Homo sapiens
cctgcaggggatggaaccttccagaagtgggcggctgtggtggtgccttctggagaggagcagagatacacctgccatgtgcagcatgagggtctgcccaagcccctcaccctgagatgggagctgtcttcccagcccaccatccccatcgtgggcatcattgctggcctggttctccttggagctgtgatcactggagctgtggtcgctgccgtgatgtggaggaggaagagctcaggacattttcttcccacagatagaaaaggagggagttacactcaggctgcaagcagtgacagtgcccagggctctgatgtgtctctcacagcttgtaaagtgtgagacag

SEQ ID NO: 974 - DNA, 571 bp, Homo sapiens
gaaagagcgagatgcgagaacacttttggctaaaaatctcccttacaaagtcactcaggatgaattgaaagaagtgtttgaagatgctgcggagatcagattagtcagcaaggatgggaaaagtaaagggattgcttatattgaatttaagacagaagctgatgcagagaaaacctttgaagaaaagcagggaacagagatcgatgggcgatctatttccctgtactatactggagagaaaggtcaaaatcaagactatagaggtggaaagaatagcacttggagtggtgaatcaaaaactctggttttaagcaacctctcctacagtgcaacagaagaaactcttcaggaagtatttgagaaagcaacttttatcaaagtaccccagaaccaaaatggcaaatctaaagggtatgcatttatagagtttgcttcattcgaagacgctaaagaagctttaaattcctgtaataaaagggaaattgagggcagagcaatcaggctggagttgcaaggacccaggggatcacctaatgccagaagccagccatccaaaactctgtttgtcaaa

SEQ ID NO: 975 - DNA, 221 bp, Homo sapiens
  misc_feature 15: n = A,T,C or G
ctggaggtgcctcanaaggtgcattctgcttcctgcaggggcttgaaacaccaaggcactccagggatcctggagtcaaagcagcagccccggttgttgcactccttgggggtgacatgggggtagccgcagtccaccctgtccttggctggcacggcacactggtttgcagacaggcccacgtactcctcagcagagctggaggacagcaaggccaggac

SEQ ID NO: 976 - DNA, 316 bp, Homo sapiens
ccatcagattgtcacagacttttataaccctttgatccctaccaacgttaagtatgagtttggccctgccatcttcattggctgggcagggtctgccctagtcatcctgggaggtgcactgctctcctgttcctgtcctgggaatgagagcaaggctgggtaccgtgcaccccgctcttaccctaagtccaactcttccaaggagtatgtgtgacctgggatctccttgccccagcctgacaggctatgggagtgtctagatgcctgaaagggcctggggctgagctcagcctgtgggcagggtgccggacaaagg

SEQ ID NO: 977 - DNA, 335 bp, Homo sapiens
cctgtttgtctgtacagcaatgcagatgcgcaggcccatcctggtggaggacccagatgcagggagcaaatattcgggttgtgttgctaagagtcgcaggaactactgctagtgatactaggcttgctgcaggaggatgtcacgctgagaaagggagatgactaggagcagaaaaagtactctcactgttccagcttccagcccaatcctagcagaatgaatgcattttaaaatcagtccacattcacatgtgctgagaaggttgttagtggtccctcatctgggcaaagcagacccaagatggtgctaagtgcagagtgcagagcattcttgtg

SEQ ID NO: 978 - DNA, 280 bp, Homo sapiens
cctaacacccaagctcttccttgcagaagagctgagatgctaaggagaccatctggagtgtcataataagcccttgggatttgctgagctcccacatggctttcttcaaccacctggcccactttcttcaaccacattccactttggaatgcgtgtctttaaggcaccaagtgatcttaagaatgggctctgtttttgaattcagcaatccaagttcctatctatctcggtgggacctccaaaaaaaagaaaaaggattggcttggcttctaatgtaagg

SEQ ID NO: 979 - DNA, 318 bp, Homo sapiens
ctgtccagatgacagtaagattccactgtctgtaatcctcatggtgccaggtctcctggggcatctagggcaatgatgctactgcagtttatgcagttacacagtcaagtctgtgccaaaggaggtcccatccggcggccaggtttctgttcagtctggggagcaatgccaactggctgcccccatagcctggcatgagctgatggcccagtgcaatcccaaagcaaagaagggcagaactgggccaagaagctgtggtaatttgctctccctgcctccgacagcgtcgtcctctccttttgcagccccacacgcagg

SEQ ID NO: 980 - DNA, 568 bp, Homo sapiens
ccagcactggctccttgatggttttcctaggacattaggacaagccgaagccctggacaaaatctgtgaagtggatctagtgatcagtttgaatattccatttgaaacacttaaagatcgtctcagccgccgttggattcaccctcctagcggaagggtatataacctggacttcaatccacctcatgtacatggtattgatgacgtcactggtgaaccgttagtccagcaggaggatgataaacccgaagcagttgctgccaggctaagacagtacaaagacgtggcaaagccagtcattgaattatacaagagccgaggagtgctccaccaattttccggaacggagacgaacaaaatctggccctacgtttacacacttttctcaaacaagatcacacctattcagtccaaagaagcatattgaccctgcccaatgggagaaccaggaagatgtggtcattcattcaatagtgtgtgtagtattggtgctgtgtccaaattagaagctaactgaggtagcttgcagcatctcttctagttgaaatggtgaactgataggaaaaca

SEQ ID NO: 981 - DNA, 550 bp, Homo sapiens
ccatccccctttagaacgtatcttaatgtgaacataaattgttcttcatgatgcttaaaagcttacatataattttcattcttagaaaaacgccacattttggatcctggatttttctgaatatcatgattgaaaaaaacaaaacaaaaaatgaacccaaatcaaagtgtggttaaacttatatgagaaagatttttcaaccagatggtcattcaaaaaagttggagctgtaagtgccggcgactgaggacacagggttaattcctcgctgctggtggaaggctagagaacatcttcaaaagagggtagcaagacgtgctcctaggggaggctcagtgtggtctcgtctgcccaagcattttcagtcttgcttggtcaatgacatcgagtaagtttttggcatccacagccagggcgtgagcagcagtcagcatttgctttttgtactcttgctggaggctggtcatgacatactgctgggccagtttcatcttgttgatgagctcacccaggtcagagttcaatagcttctgtgccatctcaatctctc

SEQ ID NO: 982 - DNA, 524 bp, Homo sapiens
ccaaggtcagaggctgatgcaacaggccctcttctccccagggccaggctcctgtccagcctgggcactgcccagagtgatggcattggtccggatgctgttctgtctctgcttggacaccttcgcaaagatttctttcaggacagtctcaaaggctagctcaacattggtagagtccagggctgaggtctccaggaagagcagtccattgttttcagcgaacattcgggcctcctcagtgggcacttcccgggcctggctgaggtcacttttgttacccacgagcatgacgacgatcgtggcttcagcatggtcatagagctccttcagccatcgctccaccacagcataggtctggtgcttggttaggtcaaacaccaggagggcccccactgcaccacgatagtacccttgaagacaaagttataatcttcctcagttccattccccatcttggctccgcatggagggtgcaggtgtcttcggggacagaggcgacaaatctgtgtgttggctcaatgccc

SEQ ID NO: 983 - DNA, 140 bp, Homo sapiens
ccttcgtgccctaacagccagtcccctgttaaagtggaagagacctgtggctgccgctggacctgcccctgtgtgtgcacaggcagctccactcggcacatcgtgacctttgatgggcagaatttcaagctgactggcag

SEQ ID NO: 984 - DNA, 358 bp, Homo sapiens
tggagcggccgcccggcaggtccaacgagtcacaacagtgcaataggtagaggattaaaaactgcatcaaacaggtgctgaaaataaatactacctaggagaaggaggtgagagccctcgtgtggggtttgttttcgaccccttgagtgtgtgtggggtttgtcttccgagccacgagcctggcctgtctcgcggtgctgttcactctgacagagtgcgcctgcagcacgttgcctccagggcccagcctcccagaagcctcagagcatcagagcatccgtcccatcggatggaccagaaacaagaaaatggggtggggtgaatcacagctatcattcaaaggaaaggaatttttttc

SEQ ID NO: 985 - DNA, 450 bp, Homo sapiens; identical to SEQ ID NO: 830

SEQ ID NO: 986 - DNA, 340 bp, Homo sapiens
cctcctgccagcagttcttgaagcttctttttcattcctgctactctacctgtatttctcagttgcagcactgagtggtcaaaatacatttctgggccacctcagggaacccatgcatctgcctggcatttaggcagcagagcccctgaccgtcccccacagggctctgcctcacgtcctcatctcatttggctgtgtaaagaaatgggaaaagggaaaaggagagagcaattgaggcagttgaccatatccagttttatttatttatttttaatttgtttttttctccaagtccaccagtctctgaaattagaacagtaggcggtatgagataatcagg

SEQ ID NO: 987 - DNA, 227 bp, Homo sapiens
ccaatgcccggagcaggccctctttccatcccgtgtcggatgagctggtcaactatgtcaacaaacggaataccacgtggcaggccgggcacaacttctacaacgtggacatgagctacttgaagaggctatgtggtaccttcctgggtgggcccaagccaccccagagagttatgtttaccgaggacctgaagctgcctgcaagcttcgatgcacgggaacaatgg

SEQ ID NO: 988 - DNA, 241 bp, Homo sapiens
cctctttttaccagctccgaggtgattttcatattgaattgcaaattcgaagaagcagcttcaaacctgccggggcttctcccgccttttttcccggcggcgggagaagtagattgaagccagttgattagggtgcttagctgttaactaagtgtttgtgggtttaagtcccattggtctagtaagggcttagcttaattaaagtggctgatttgcgttcagttgatgcagagtgggtttt

SEQ ID NO: 989 - DNA, 193 bp, Homo sapiens
ccagccgtgtcccagacttgtagtttgatcttcttcccctctatatccacagtgcggatcttgaaatcaattccgatggtggagatgtaagtgttgttgaagttgtcctctgcaaagcgaatgatcagacaagtcttgcccacccccgagtccccgatcagcagcaacttgaagaggtggtcgtaggctttgg

SEQ ID NO: 990 - DNA, 499 bp, Homo sapiens
cctcaaccaagagggttgatggcctccagtcaagaaactgtggctcatgccagcagagctctctcctcctccagcaggcgccatgcaagggcaggctaaaagacctccagtgcatcaacatccatctagcagagagaaaaggggcactgaagcagctatgtctgccaggggctaggggctcccttgcagacagcaatgctacaataaaggacacagaaatgggggaggtgggggagccctatttttataacaaagtcaaacagatctgtgcgttcattcccccagacacacaagtagaaaaaaaccaatgctgtggtttctgccaagatggaatattcctcctcctagttccacacatggcgtttgcaatgctcgacagcattgcactgggctgctgtctctgtgttctggcaccagtagcttgggccccatatacacttctcagttcccaacaagggcttatgggccgaggggcaggctccaattttcaagcacacga

SEQ ID NO: 991 - DNA, 262 bp, Homo sapiens
ctgccagccaggctgtggtcagtcctctggcaggcaatcttcggcaccgagagcctctgtccattagtgtcagccccgagggggccacgacggaggccgcccaatgtccactgtgatattggtgaagagtggttgccgagacacctccaagacctggtaccgcactgacccaatgccgtcccgcttcatggtcagcttcgtgttttgaatcttggtaaacctctgagggttaggttcgttatgcttgtcgcggtcgtgcttg

SEQ ID NO: 992 - DNA, 535 bp, Homo sapiens
  misc_feature 90, 91, 467, 524: n = A,T,C or G
ctgctgcttgtgaaattcatgtgtggtactaagtaccttacatgaattatttcatttaaccctcccaacagtctcctttgtacgtgctgnnctctctgcctggaaacactgtttcccacccccaacccccaattcttctgtttatttttcttgagacagagtctcactgtgtagcccagactggagtgcagtggcgcgatctcggctcactccaatctccgcctcccgggtccctgttcaagcagttctcctgcctcagcctcctgagtagctgggattacaggcacacgccaccatgtccagctaatttctgtatttttagtagagatggggtttcacgatgttggctaggatggtctcgatctctggtcagagtcttttctgtaaatatccttggtaaagaagcaattttagactgtagctgttgcaaatgctttaaggaagaagcaaaacaactgtcagtcttnctgaaatgaagaaactacaccagggctgctatatcagagcaaccccaaccagcactncaatcatgatg

SEQ ID NO: 993 - DNA, 232 bp, Homo sapiens
ctgctgctctcccctcccagtctctactcactgggatgaggttaggtcatgaggacaccaaaaacctaaaaataaacaaaaagccaaacaagccttagcttttcttaaaggctgaaatgcctggaagtgtccctttatttataaaataacttttgtcatatttcttatacatgtttcttgtaagaaattcagaaactacagacaaagagagtggaaattacccactgtcagg

SEQ ID NO: 994 - DNA, 203 bp, Homo sapiens
ccagcagatcatccacgacgaccaccctctgtcctggctccagggcgtctttctgaatctccagctcagccttcccgtactccagggaataggaggcccacagagtggggcctggcagcttcccccgctttcggatgagcacgcagcccagtccaagctcctgggccagggaggggccaaagaggaagcctcgggagtctagg

SEQ ID NO: 995 - DNA, 238 bp, Homo sapiens
ccatgcctgccccgcccactctgtatatatgtaagttaaacccgggcaggggctgtggccgtctttgtactctggtgatttttaaaaattgaatctttgtacttgcattgattgtataataattttgagaccaggtctcgctgtgttgctcaggctggtcccaaactcctgagatcaagcaatccgcccacctcagcctcccaaagtgctgagatcacaggcgtgagccaccaccagg

SEQ ID NO: 996 - DNA, 379 bp, Homo sapiens
ctgcagcctgggactgaccgggaggctctgaccatttacccaccacaggtaggttgtgttctgaacctcaggttcacaggtgaaggccacagcatccttgtcctccacggggttggagttgttgctggagatggagggcttgggcagctccgggtatacatggaactgtccggttgcttcttcattcacaagatctgactttatgacttgtagggtatagaatcctgtgtcattctgggtgacgttctggatcagcagggatgcattggggtatattgtctctcgaccactgtatgcgggccctggggtagcttgttgagttcctattacatatcctacaattagactgttgccatccactctttcgcctttgtaccag

SEQ ID NO: 997 - DNA, 210 bp, Homo sapiens
ccatccgaagcaagattgcagatggcagtgtgaagagagaagacatattctacacttcaaagctttggtgcaattcccatcgaccagagttggtccgaccagccttggaaaggtcactgaaaaatcttcaattggattatgttgacctctaccttattcattttccagtgtctgtaaaggccgtggagaagtgtaaagatgcaggattgg

SEQ ID NO: 998 - DNA, 207 bp, Homo sapiens
  misc_feature 61: n = A,T,C or G
ggtggctgtgctgggggcgccccacaaccctgctcccccgacgtccaccgtgatccacatncgcagcgagacctccgtgcccgaccatgtcgtctggtccctgttcaacaccctcttcatgaacccctgctgcctgggcttcatagcattcgcctactccgtgaagtctagggacaggaagatggttggcgacgtgaccggggccca

SEQ ID NO: 999 - DNA, 315 bp, Homo sapiens
ccaatgggctttgctgtagcttgctgaaatcaccaagcaggagagatttaaccagaggcgatgtgtccagtcaccagcatagagccatcctctgtgtcaccatccacacgcagggccttctggcagacctcatgcaatgccctccatgttaatattcatcagaaaatggataattaggggggccagcaaaaatatcaagggtcaaatatcgcacatttctgtttaggccatctatggctttcatctcctctgaagtcaactggaattcaaacacctgcacgttctgtctgatgcgctgctcattgtagctcttgg

SEQ ID NO: 1000 - DNA, 186 bp, Homo sapiens
ctgttactcaagaagatgtatttaatgcttgacaataagagaaaggaagtagttcacaaaataatagagttgctgaatgtcactgaacttacccagaatgccctgattaatgatgaactagtggagtggaagcggagacagcagagcgcctgtattggggggccgcccaatgcttgcttggatcag

SEQ ID NO: 1001 - DNA, 173 bp, Homo sapiens
ccacaaagcggaaactcatccacttttgcctttttccgccccaggtcaaaaatgcgaatcttggcatcagggacacctcggcagaagcgagactttgggtacggcttgttcttacaataccggtaacaacgggcggggcggcggcccatggcgacaccaggatcttcagtggc

SEQ ID NO: 1002 - DNA, 302 bp, Homo sapiens
ctgaatgcctgagcccagcagggagctgaggatcatggggtactgggggggcctgaagacgtcgccgtgcaccaacttccacccagactcctccatggtgtcttcaatgtcatcctccttgttgtagttggcaatgtccttccggagggtccgaatgataatcatgctcaggatacctgacaggaagaagaccacaacaacggagttaatgatagaaaaccagtggatctggacgtcactcatggtcaggtaagtgtcccagcgagaggcccatttgatatcactttcctcccagtggacag

SEQ ID NO: 1003 - DNA, 368 bp, Homo sapiens
cctgggcccgctgacttcagggtgaggccacagctactgcagcgctttttatttatttatttatttactgagatggagtcttgctctgtcacccaggctggagtgcagtggtgcaatctcggctcactgcaacctctgcctcctgggctgcagtgattctcctgcgttcaagtaattctcctgcctcggccttctgagtagttgggattacaggcatatgccaccacacttggctaattttttgtatttttagtagaaatggggtttcaccatgttggcgaggctggtctcgaactcccgacctcaaggatcctcctgcctcggcctcctaaggtgctgggattgcaggtgtgagccaccacgtctgg

SEQ ID NO: 1004 - DNA, 294 bp, Homo sapiens
ctgggcggatagcaccgggcatattttggaatggatgaggtctggcaccctgagcagtccagcgaggacttggtcttagttgagcaatttggctaggaggatagtatgcagcacggttctgagtctgtgggatagctgccatgaagtaacctgaaggaggtgctggctggtaggggttgattacagggttgggcacagctcgtacacttgccattctctgcatatactggttagtgaggtgagcctggcgctcttctttgcgctgagctaaagctacatacaatggctttgtgg

SEQ ID NO: 1005 - DNA, 414 bp, Homo sapiens
ctgaagcactcttcagagactacgtccacagacactgatgctgaggcctttcttgtaagtgaagaaaaaggaatgcagcaaagaagagttcgacattggagtccttagttccatcaggatcccattcgcagcctttagcatcatgtagaagcaaactgcacctatggctgagataggtgcaatgacctacaagattttgtgttttctagctgtccaggaaaagccatcttcagtcttgctgacagtcaaagagcaagtgaaaccatttccagcctaaactacataaaagcagccgaaccaatgattaaagacctctaaggctccataatcatcattaaatatgcccaaactcattgtgactttttattttatatacaggattaaaatcaacattaaatcatcttatttacatgg

SEQ ID NO: 1006 - DNA, 272 bp, Homo sapiens
ccggagcccacggtggtcatggctgccagagcgctctgcatgctggggctggtcctggccttgctgtcctccagctctgctgaggagtacgtgggcctgtctgcaaaccagtgtgccgtgccagccaaggacagggtggactgcggctacccccatgtcacccccaaggagtgcaacaaccggggctgctgctttgactccaggatccctggagtgccttggtgtttcaagcccctgcaggaagcagaatgcaccttctgaggcacctccag

SEQ ID NO: 1007 - DNA, 313 bp, Homo sapiens
  misc_feature 14: n = A,T,C or G
cctgccttactctnttccctttccccagggactcttggttttcagaagcccctctggaatgtcctacctggcctaaccccataccagcagtgcagacaaggaggcactcctactatagtgggtccagcccatggagagactcacttcctgccccaacacctcttcccctagaccctgagggccaggacaatgtcttagtgccttccaacttggcagagtgaggccccatgagacagagagaaagggggaagagggaaatacctttatccaaataaatacccatccaaaattatttgtgataggtgaaaaatgg

SEQ ID NO: 1008 - DNA, 317 bp, Homo sapiens
cctcaatgtcgtgctagaggggccgaagaaggccgtgaacgacgtgaatggcctgaagcaatgtttggcagaattcaagcgggatctggaatgggttgaaaggctcgatgtgacactgggtccggtaccggagatcggtggatctgaggcgccagcacctcagaacaaggaccagaaagctgttgatccagaagacgacttccagcgagagatgagtttctatcgccaagcccaggccgcagtgcttgcagtcttaccccgcctccatcagctcaaagtccctaccaagcgacccactgattattttgcggaaatgg

SEQ ID NO: 1009 - DNA, 456 bp, Homo sapiens
tttttttgtagggtatagaaaatacatttttaattttgatagagttcacaaatgacagcattgacatttctttaaacaaatacttctgtcaaggcacagcattaccatgtgtccccagatgcccaagaggcagtgatttcatgtccccctgaggtttagcagagccaccaatgtcaatagggtggctgacggggcctagatttgctaccagataagccaatgagacatgctgtcagatttatggttacataatcaagtatttaaaaagatgcacaataggtaactgcaatgagcttgttctgcatttagcgatagttcctttcaaacaaagaagatagttttcagtatcaagaaggatgcctatatgtatgtcttccatggagcctttcctacaaattgctttcattacacattaaaaggagttcagctttattgtgaccttcttgagtcattcag

SEQ ID NO: 1010 - DNA, 196 bp, Homo sapiens
ctgggcatgggctgaggagaggtcttgcttgcccccttcaactttccatctcagaactataaactgctaggctgcaaggagagaagggctaagtgggggtcagacaggagagaagggcaggaggcagtgagccccgatgacccaccaactccaccaggccctgacagggaagcccctttggttagtatcattttgg

SEQ ID NO: 1011 - DNA, 449 bp, Homo sapiens
ccttgcggctgctgcgaaaggccacggcgctgcctgcccgccgggccgagtactttgatggttcagagcccgtgcagaaccgcgtgtacaagtcactgaaggtctggtccatgctcgccgacctgaaggagagcctcggcaccttccagtccaccaaggccgtgtacgaccgcatcctggacctgcgtatcgcaacaccccagatcgtcatcaactatgccatgttcctggaggagcacaagtacttcgaggagagcttcaaggcgtacgagcgcggcatctcgctgttcaagtggcccaacgtgtccgacatctggagcacctacctgaccaaattcattgcccgctatgggggccgcaagctggagcgggcacgggacctgtttgaacaggctctggacggctgccccccaaaatatgccaagaccttgtacctgctgtatgcacag

SEQ ID NO: 1012 - DNA, 289 bp, Homo sapiens
  misc_feature 274, 275: n = A,T,C or G
ccaggaccacaaccccacgctgtagctggtagcgcagggcaatcagggctggggttcgcttgtgcttttttgccaaggcacaaaggactgggtcctccaagagcaccggggagttcgggtccacccatggttcttctcggtgggatcccagagcactataggcaaccagaacaatgtcttttgacttgcagaaatccagcagttttctctggttgaagtaaggatgacattccacctggttgcagacaggcttgtacttgagccctggcttgtnnaggatcatctccag

SEQ ID NO: 1013 - DNA, 221 bp, Homo sapiens
  misc_feature 98, 99, 132, 133, 180: n = A,T,C or G
tctgtaaatgctgcgttcctaatttagtaaaataaaagaatagacactaaaatcatgttgatctataattacacctatgggatcaataagcatgtcannactgattaatgtctactgtaaaaatttggtagnnaaattttcatttgatattagatataaatatctgaatataaataattntaatatactagtcatgatgtgtgttgtattttaaaaattat

SEQ ID NO: 1014 - DNA, 512 bp, Homo sapiens
gggcccccgaagcctctacaatgggctggttgccggcctgcagcgccaaatgagctttgcctctgtccgcatcggcctgtatgattctgtcaaacagttctacaccaagggctctgagcatgccagcattgggagccgcctcctagcaggcagcaccacaggtgccctggctgtggctgtggcccagcccacggatgtggtaaaggtccgattccaagctcaggcccgggctggaggtggtcggagataccaaagcaccgtcaatgcctacaagaccattgcccgagaggaagggttccggggcctctggaaagggacctctcccaatgttgctcgtaatgccattgtcaactgtgctgagccggcgacctatgacctcatcaaggatgccctcctgaaagccaacctcatgacagatgacctcccttgccacttcacttctgcctttggggcaggcttctgcaccactgtcatcgcctcccctgtagacgtggtcaagacgagatacatga

SEQ ID NO: 1015 - DNA, 553 bp, Homo sapiens
  misc_feature 518: n = A,T,C or G
ctgggcaggaagattatgatcgcccgaggcccctctcctacccagataccgatgttatactgatgtgtttttccatcgacagccctgatagttcagaaaacatcccagaaaagtggaccccagaagtcaagcatttctgtcccgacgtgcccatcatcctggttgggaataagaaggatcttcggaatgatgagcacacaaggcgggagctagccaagatgaagcaggagccggtgaaacctgaagaaggcagagatatggcaaacaggattggcgcctttgggtacatggagtgctcagcaaagaccagagatggagtgagagaggtttttgaaatggctacgagagctgctctgcaagctagacgtgggaagaaaaaatctgggtgccttgtcttgtgaaaccttgctgcaagcacagcccttatgcggttaattttgaagtgctgtttattaatcttagtgtatgattactggcctttttcatttatctataatttacctaagattacaaatcangaagtcatcttgctaccagtatttagaagccaact

SEQ ID NO: 1016 - DNA, 431 bp, Homo sapiens
ccacttcacatgatggcgggcctttaagagcacaaagaagtttaatatggacaacaacaggaaaaagcaagaagaaaacaagtagggaaagacagctaacctggagagagagaatttctttaacctttatgttcttcattaaaaatcttatcttggactgatttgagggatttttagaaacatggccttattttatataagcattaccttcccaggaatctttgttgtatattaatttttgataaccatttgattaactttaaaattaagtatatgtgtgtatatatacatatgtatgtttatatacacacatgtatctgtatagttttatatatacatatatacacatagacatacagagaaccactactttgtaatagtgtacagtttgttttatatctctttactttttttgttactattttatctgt

SEQ ID NO: 1017 - DNA, 490 bp, Homo sapiens
  misc_feature 427, 434: n = A,T,C or G
ctggaagaacaaggcgaagttctggtggctgtctgcgatgaatgtgcccttggctttggctgggtatgtcacccgggtagttttgggtgcaatgctctgatccttatccacggtggaaagatcaacatttgtgatgccaacttcagtggagatcttgactctgagctctacggtatttgcaatataccggttgtcaccttcaacttcgacaaggaagtcataataaccactggaaaatttgacgttcatgaaatttagttcaaaaacatcccctacaggggtgaaggatgtcttctggaggacagtggctctggaagcaacagatttagcatgttctagtttaacagtggcctgagtcagaggctgagacagaacattggtgacttgcaaccgcaagatagcctgttcatgagtgtcggaagcaganccctcangcacaaccacaactggcacgtggtagcgattatgcgagagcacaggcagacctcgg

SEQ ID NO: 1018 - DNA, 503 bp, Homo sapiens
ggagtaagctgagtacaagtaccatagcagcagagctgcaaaaggtcttgggacctatagtcctaatgcaagataaggtcatggggcctaaggccatggggcctgaggcacccctagaccctgagccttcagcatttaagggagggtgtccccccattctcgataggccatggtacacagatgggtctagccgaggtgctataactgcttggaccactgttgcagtccaacctagtactgacactatatggtttgaaacccggtgtggacaaagtagccaatgggctgaacttagagcagtgtggatggtgatcaccaaggaggtgacactgatggtaatctgtatcaatagctgggtggtctaccaaggcttaactttgtggttaactacctggaaaatacagaagttgctagtcggccaccaacccatttggggtcaagccacgtggcaagacctctgggaaatgggtcatcagaaacaggtaaccgtttatcatgtgtca

SEQ ID NO: 1019 - DNA, 348 bp, Homo sapiens
cctgtgtatggagtagaggcgggtgcacgggtactgttcctcacggcagtcaagaggcccaggctctgtgggctccagctctgcatttcccggttctggggttggggctgggatgacttcctgttggacttgctgctgggactggaactggaactgttcctcggagggccgaggagtcacctcttgataatcatagtagtctgggttgtcgatctggtcgctatagtgggtgtactggacgtggtcagggaacggcggcagcgggtccaggtcatactggccctgagccagcaagcctgcaggcaggaatagcaggaagaggtaggcagctctcatggcaacaaagag

SEQ ID NO: 1020 - DNA, 260 bp, Homo sapiens
ccacacggcgaccgagggacagatggggccctgcgtcccataggctgcctgaaggtgggtagggcggcctgcggcatagtggggtggctgtgggctcccagcctggcccctgggaaccgtgggagcacagggacaagcacatggctatggaatgcagggtgacccaaggacaagcgagttgcggggatctctactgtgaccatgcagaattgatcgcagtctgctgcgccaccaccacctcatgttcccgaggggaacag

SEQ ID NO: 1021 - DNA, 407 bp, Homo sapiens
ccttatgactataacggcccacgagaaaaatatggaatcgttgattacatgatcgagcagtccgggcctccctccaaggagattctgaccctgaagcaggtccaggagttcctgaaggatggagacgatgtcatcatcatcggggtctttaagggggagagtgacccagcctaccagcaataccaggatgccgctaacaacctgagagaagattacaaatttcaccacactttcagcacagaaatagcaaagttcttgaaagtctcccaggggcagttggttgtaatgcagcctgagaaattccagtccaagtatgagccccggagccacatgatggacgtccagggctccacccaggactcggccatcaaggacttcgtgctgaagtacgccctgcccctggttgg

SEQ ID NO: 1022 - DNA, 140 bp, Homo sapiens
ccaccccagagtgggagaggctgggaggttgggaggctgtggagagaagtgagcaaggtgctcttgaacctgtgctcattttgcaattttatcagtaatttgacttagagtttttacgaaacctcttttgttgtccttgc

SEQ ID NO: 1023 - DNA, 280 bp, Homo sapiens
ctggaggtgcctcagaaggtgcattctgcttcctgcaggggcttgaaacaccaaggcactccagggatcctggagtcaaagcagcagccccggttgttgcactccttgggggtgacatgggggtagccgcagtccaccctgtccttggctggcacggcacactggtttgcagacaggcccgcgtactcctcagcagagctggaggacagcaaggccaggaccagccccagcatgcagagcgctctggcagccatgaccaccgtgggctccgggacgcagc

SEQ ID NO: 1024 - DNA, 274 bp, Homo sapiens
  misc_feature 262: n = A,T,C or G
cctggctgagcaggcagagcaccctgggaccccagggcagaaggacccctgccctccagtccccaagacccaggcccgtctccactcatacacgccacctacatgtgacgtcagccctgaaaaggtaacaggaaagttcagaacaaaaacaaaaccccaaaagtaaaaaggctacgtgtagcagagtaataccggaaacgttatatacacaggcggtgatggccccctcggaagtgtccgggtcacttagggggcactgcanaggtccctgtgg

SEQ ID NO: 1025 - DNA, 446 bp, Homo sapiens
  misc_feature 427, 431, 440: n = A,T,C or G
gcaaagagtgtactgtgcttgaggcagagcactcacacataaatggctgtgtgtggaattgcttgccaaagaagtttctagcctttccctttcccctaactgcatcagggaagaattcttatctctagcttggtttccacatgaggtttttctgagaagggcttgggacaagaagtctgtcatgttagttaagcaggcaagaaatcctactaatccagttttgtttgaaagttgtttgtccgtatgattttttaaaagtcaagtttaatttcaaaaaaccttttttttctgagattacttttggggtaatatttaaaatgagagacattttgtaaccctgtaaaatacatagggaatataacattccagtgtatacaaagaaggcaaattctttaatcaaataaagcgcattataaaatcaaaaaanaaanaaaaaaaanaaaaaa

SEQ ID NO: 1026 - DNA, 189 bp, Homo sapiens
ctgtgagagagatgctcaatatgccccaggctatgacaaagtcaaggacatctcagaggtggtcacccctcggttcctttgtactggaggagtgagtccctatgctgaccccaatacttgcagaggtgattctggcggccccttgatagttcacaagagaagtcgtttcattcaagttggtgtaatcag

SEQ ID NO: 1027 - DNA, 92 bp, Homo sapiens
ccagaccctccttagtacaggatctcggaccacaaaccaaggagtctcgtggccttggattcccagaccctaggatggtatccctctgacag

SEQ ID NO: 1028 - DNA, 438 bp, Homo sapiens
ctgaaaagccatctttgcattgttcctcatccgcctccttgctcgccgcagccgcctccgccgcgcgcctcctccgccgccgcggactccggcagctttatcgccagagtccctgaactctcgctttctttttaatcccctgcatcggatcaccggcgtgccccaccatgtcagacgcagccgtagacaccagctccgaaatcaccaccaaggacttaaaggagaagaaggaagttgtggaagaggcagaaaatggaagagacgcccctgctaacgggaatgctaatgaggaaaatggggagcaggaggctgacaatgaggtagacgaagaagaggaagaaggtggggaggaagaggaggaggaagaagaaggtgatggtgaggaagaggatggagatgaagatgaggaagctgagtcagctacgggcaagcgggcag

SEQ ID NO: 1029 - DNA, 330 bp, Homo sapiens
ccagccgcatgggagtggaggcagtcatcgccttgctagaggccaccccggacaccccagcttgcgtcgtgtcactgaacgggaaccacgccgtgcgcctgccgctgatggagtgcgtgcagatgactcaggatgtgcagaaggcgatggacgagaggagatttcaagatgcggttcgactccgagggaggagctttgcgggcaacctgaacacctacaagcgacttgccatcaagctgccggatgatcagatcccaaagaccaatcgcaacgtagctgtcatcaacgtgggggcacccgcggctgggatgaacgcggccgtacgctcag

SEQ ID NO: 1030 - DNA, 228 bp, Homo sapiens; identical to SEQ ID NO: 903

SEQ ID NO: 1031 - DNA, 294 bp, Homo sapiens
ccacaaagccattgtatgtagctttagctcagcgcaaagaagagcgccaggctcacctcactaaccagtatatgcagagaatggcaagtgtacgagctgtgcccaaccctgtaatcaacccctaccagccagcacctccttcaggttacttcatggcagctatcccacagactcagaaccgtgctgcatactatcctcctagccaaattgctcaactaagaccaagtccccgctggactgctcagggtgccagacctcatccattccaaaatatgcccggtgctatccgcccag

SEQ ID NO: 1032 - DNA, 278 bp, Homo sapiens
ggaggtattacagacagcactgcactttggagttgggcagctacatcgaggacctctttgtggtccacagtgacctctccagcattgtgatcctggataactccccaggggcttacaggagccatccagacaatgccatccccatcaaatcctggttcagtgaccccagcgacacagcccttctcaacctgctcccaatgctgggtgccctcaggttcaccgctgatgttcgttccgtgctgagccgaaaccttcaccaacatcggctctggtgacgg

SEQ ID NO: 1033 - DNA, 155 bp, Homo sapiens
  misc_feature 9, 17, 31, 74, 75: n = A,T,C or G
cgcgttcanccatgttnaaaccgattgcatnaacttcgaaaccggcccgcccgccggcgcctggagaggggcanngggagaagcagagagtttatcattcatctgtacacatagacgtttcttctttaaataacaccacgggcgggagccccatc

SEQ ID NO: 1034 - DNA, 401 bp, Homo sapiens
ctggaccagcaccccattgacgggtacctctcccacaccgagctggctccactgcgtgctcccctcatccccatggagcattgcaccacccgctttttcgagacctgtgacctggacaatgacaagtacatcgccctggatgagtgggccggctgcttcggcatcaagcagaaggatatcgacaaggatcttgtgatctaaatccactccttccacagtaccggattctctctttaaccctccccttcgtgtttcccccaatgtttaaaatgtttggatggtttgttgttctgcctggagacaaggtgctaacatagatttaagtgaatacattaacggtgctaaaaatgaaaattctaacccaagacatgacattcttagctgtaacttaactattaagg

SEQ ID NO: 1035 - DNA, 333 bp, Homo sapiens
ctgagctgggggttgaatttctccaggcactccctggagagaggacccagtgacttgtccaagtttacacacgacactaatctcccctggggaggaagcgggaagccagccaggttgaactgtagcgaggcccccaggccgccaggaatggaccatgcagatcactgtcagtggagggaagctgctgactgtgattaggtgctggggtcttagcgtccagcgcagcccgggggcatcctggaggctctgctccttagggcatggtagtcaccgcgaagccgggcaccgtcccacagcatctcctagaagcagccggcacaggagggaaggtgg

SEQ ID NO: 1036 - DNA, 198 bp, Homo sapiens
ccaatgtacatggtggactatgccggcctgaacgtgcagctcccgggacctcttaattactagacctcagtactgaatcaggacctcactcagaaagactaaaggaaatgtaatttatgtacaaaatgtatattcggatatgtatcgatgccttttagtttttccaatgatttttacactatattcctgccaccaagg

SEQ ID NO: 1037 - DNA, 289 bp, Homo sapiens
ctggagatgatcctcaacaagccagggctcaagtacaagcctgtctgcaaccaggtggaatgtcatccttacttcaaccagagaaaactgctggatttctgcaagtcaaaagacattgttctggttgcctatagtgctctgggatcccaccgagaagaaccatgggtggacccgaactccccggtgctcttggaggacccagtcctttgtgccttggcaaaaaagcacaagcgaaccccagccctgattgccctgcgctaccagctacagcgtggggttgtggtcctgg

SEQ ID NO: 1038 - DNA, 368 bp, Homo sapiens
ccagacgtggtggctcacacctgcaatcccagcaccttaggaggccgaggcaggaggatccttgaggtcaggagttcgagaccagcctcgccaacatggtgaaaccccatttctactaaaaatacaaaaaattagccaagtgtggtggcatatgcctgtaatcccaactactcagaaggccgaggcaggagaattacttgaacgcaggagaatcactgcagcccaggaggcagaggttgcagtgagccgagattgcaccactgcactccagcctgggtgacagagcaagactccatctcagtaaataaataaataaataaaaagcgctgcagtagctgtggcctcaccctgaagtcagcgggcccagg

SEQ ID NO: 1039 - DNA, 417 bp, Homo sapiens
  misc_feature 226, 227, 246, 259, 390, 391: n = A,T,C or G
ctgggcctatgctggtcatgaacggtcctggaaaatgactcccttccttcagtatctgcatcctcatgaagtcattcattttggagatcgtgtcttcacttttcttggtgaagaaactgctggatggagttgttggtggcatctgaggagtccgaagatggctctcagggaaggttgtgctggcctctgaaggatttggaagctgactctgttcctggggtagctnnatgctcttggggtcattgnttctcgggtttgnttttttctttatctggataaaactatgcatttctgaaatcagttttgacatctggttcttttttcctaagtcgaaagcagaaaagttggaagcttatctccttcttcacagggggatattgtggacattgnnctgtccccactacatccatttttcct

SEQ ID NO: 1040 - DNA, 409 bp, Homo sapiens
ctgtccaatggcaacaggaccctcactccattcaatgtcacaagaaatgacgcaagagcctatgtatgtggaatccagaactcagtgagtgcaaaccgcagtgacccagtcaccctggatgtcctctatgggccggacacccccatcatttcccccccagactcgtcttacctttcgggagcgaacctcaacctctcctgccactcggcctctaacccatccccgcagtattcttggcgtatcaatgggataccgcagcaacacacacaagttctctttatcgccaaaatcacgccaaataataacgggacctatgcctgttttgtctctaacttggctactggccgcaataattccatagtcaagagcatcacagtctctgcatctggaacttctcctggtctctcag

SEQ ID NO: 1041 - DNA, 492 bp, Homo sapiens
  misc_feature 473: n = A,T,C or G
cctcggctccacacctccgctgtgaccacagcctcaggtcaagctgtgctggggccatccaccttcctttgccatttagaagatggggcttggagcttggcaacacagaaattgacatcagccttataaaaccttggctgaacctaccgacctccaggagaatttcagccaaaacaaaaaagcaaatacacagagggaccctggaaccagaatccctccccatgggaaagacgaaggcacagagattcgagccaagtttcccaacatgttggtgtttgcagaaaagtccggtcacgtcacacacagcacagaggcaagaagcgaaggcagtggcattcacaggactactttatattaaagtttattacatttggaaaatctactgtacagggaaaaacccattggattaagtagagttttgccaaaagcaaaagactatcactctttggaaaatattcctgattccagcccanggcccagggtggggccaca

SEQ ID NO: 1042 - DNA, 125 bp, Homo sapiens
cctggctctgatccagtgacccctctcaccaaagaactcggtttaaccagggctctgtaagaccactcccacccagagacttgtgtggcctggtgtggcctgtgtgtcggattccttcctgtcag

SEQ ID NO: 1043 - DNA, 459 bp, Homo sapiens
ccagcctggagataagggtgaaggtggtgcccccggacttccaggtatagctggacctcgtggtagccctggtgagagaggtgaaactggccctccaggacctgctggtttccctggtgctcctggacagaatggtgaacctggtggtaagggagaaagaggggctccgggtgagaaaggtgaaggaggccctcctggagttgcaggaccccctggaggttctggacctgctggtcctcctggtccccaaggtgtcaaaggtgaacgtggcagtcctggtggacctggtgctgctggcttccctggtgctcgtggtcttcctggtcctcctggtagtaatggtaacccaggacccccaggtcccagcggttctccaggcaaggatgggcccccaggtcctgcgggtaacactggtgctcctggcagccctggagtgtctggaccaaaaggtgatgctgg

SEQ ID NO: 1044 - DNA, 368 bp, Homo sapiens
cctgggcccgctgacttcagggtgaggccacagctactgcagcgctttttatttatttatttatttactgagatggagtcttgctctgtcacccaggctggagtgcagtggtgcaatctcggctcactgcaacctctgcctcctgggctgcagtgattctcctgcgttcaagtaattctcctgcctcggccttctgagtagttgggattacaggcatatgccaccacacttggctaattttttgtatttttagtagaaatggggtttcaccatgttggcgaggctggtctcgaactcctgacctcaaggatcctcctgcctcggcctcctaaggtgctgggattgcaggtgtgagccaccacgtctgg

SEQ ID NO: 1045 - DNA, 315 bp, Homo sapiens
ccaatgggctttgctgtagcttgctgaaatcaccaagcaggagagatttaaccagaggcgatgtgtccagtcaccagcatagagccatcctctgtgtcaccatccacacgcagggcctcctggcagacctcatgcaatgccctccatgttaatattcatcagaaaatggataattaggggggccagcaaaaatatcaagggtcaaatatcgcacatttctgtttaggccatctatggctttcatctcctctgaagtcaactggaattcaaacacctgcacgttctgtctgatgcgctgctcattgtagctcttgg

SEQ ID NO: 1046 - DNA, 317 bp, Homo sapiens
cctcgcctggagggccccgggcagcacagggaggacgagcttgtccagcagagggtctggcagagggtcccgcagaggtttgggcagggggtctgacatccctggctcctgctctggctctggctgccgggatttgcacaggcccaggtgcatacagatgccgtttgagtcaatctggttctggaagtagtcgatgaccagggggaagtagtcgtcaagcacttggttgcactggggcatgagcagcttcaaggggaggacgttgcactcctgctccaggaacttcctcaccgtgtcctggaaaatggcctccttgg

SEQ ID NO: 1047 - DNA, 412 bp, Homo sapiens
  misc_feature 183, 271, 287, 292, 294, 343: n = A,T,C or G
gtacaagctttttttttttttttttttttttttgtttaatgcttgaactttattttggagagagaaatttagaaagacacaaggtacacagagtaaaatgtttttcttttttcaggaccttgaactgaatcttgcactgctttggtttctatctaggaagctcagcgacagcagagtctgtanaggcggccactgatttcacacaccccggagagggactcacgggtagcacaacggccggttcggcaatagcaggtggctcttgcctganaacctgaggttctaanagcananagtccatttcctgcaaaggagatagcaaggtcctggttgtcttccccanactgcttctgggttgtagcctcatcagctctttcctggagtgactcagcctgggcctgcagggccacca

SEQ ID NO: 1048 - DNA, 476 bp, Homo sapiens
  misc_feature 267, 336, 344, 360, 395, 419, 420, 430, 441: n = A,T,C or G
taaaaaaaggaaaaagttttattacgaaactagtttgtataaaacagggttatacatatttttgtaagtttgtaataaaacagtaagaaaaaaaggcagtaatagaaatctccaaaaggcaacctatcaaaaccaactggctgccactttgagtttggacagtagctgcataaactttgttcttcttgaacagtatttaataacatcattaatacattaacaacatttctataaagtaagacacattggtgctgaagtacaactggnggcctcttgatctcacctatgaggagagttctttacaaaaccacatagggaaaattgcagttgtaaggngaactacncatctaaaatatgcanaggtaatagcattacatgttaaaggtatcaagggnatatacacattttaaaccatttgnnacaaaacttntataaaatttntttctctctctttctctcttatgcacaaaaaatat

SEQ ID NO: 1049 - DNA, 274 bp, Homo sapiens
cctggctgagcaggcagagcaccctgggaccccagggcagaaggacccctgccctccagtccccaagacccaggcccgtctccactcatacacgccacctacatgtgacgtcagccctgaaaaggtaacaggaaagttcagaacaaaaacaaaaccccaaaagtaaaaaggctacgtgtagcagagtaataccggaaacgttatatacacaggcggtgatggccccctcggaagtgtccgggtcacttagggggcactgcagaggtccctgtgg

SEQ ID NO: 1050 - DNA, 472 bp, Homo sapiens
ctgcagcctgggactgaccgggaggctctgattatttacccaccacaggtaggttgtgttctgaatctcaggttcacaggttaaggctacagcatcctcatcctccacggggttggagttgttgctggtgatgaagggtttgggtggctctgcatagactgtgatcgtcgtgactgtggtcctattgaggccagtgtctgagttatgggcttggcacgtataggatccactattattcacagtgatgttggggataaagagctcttgggtggattgctggaaagtcccattgacaaaccaagagtactgtgcaggtgggttagaggctgcgtggcaggagaggttcagattttcccctgatctgtaagatgtgtttagaggggaaatggtgggggcatccgggccatagaggacattcaggatgactgaatcactgcgcctggcactcactgggttctgggtttcacatttg

SEQ ID NO: 1051 - DNA, 249 bp, Homo sapiens
ccaccaaccgtggcatcacgcgaatccggggcaccagctaccagagccctcacggcatccccatagacctgctggaccggctgcttatcgtctccaccaccccctacagcgagaaagacacgaagcagatcctccgcatccggtgcgaggaagaagatgtggagatgagtgaggacgcctacacggtgctgacccgcatcgggctggagacgtcactgcgctacgccatccagctcatcacagacctgc

SEQ ID NO: 1052 - DNA, 289 bp, Homo sapiens
ccaggaccacaaccccacgctgtagctggtagcgcagggcaatcagggctggggttcgcttgtgcttttttgccaaggcacaaaggactgggtcctccaagagcaccggggagttcgggtccacccatcgtttgtctcgttgagatcccagagcactataggcaaccagaacaatatctttcgacttgcagaaatctagcaatttactccggttgaaatacggatgacattctacctggttgcagacaggcttgtacttgagtcctggcttgttgaggatcatctccag

SEQ ID NO: 1053 - DNA, 199 bp, Homo sapiens
ccacgactgcatgcccgcgcccgccaggtgatacctccgccggtgacccaggggctctgcgacacaaggagtctgcatgtctaagtgctagacatgctcagctttgtggatacgcggactttgttgctgcttgcagtaaccttatgcctagcaacatgccaatctttacaagaggaaaccgtaagaaagggcccagccg

SEQ ID NO: 1054 - DNA, 224 bp, Homo sapiens
tcgaccctgtgaagcaggagacagatgctgcattttcactgttgtttgtcctctgtttttgtagcatccccgggaacttccccatcagccaggggcttgtccccaccacccttcacctggctttccagttggctgagacgctgcttcatcttcatctgggtggcgttgtactcagccaggaggcgtgcaaacctggtctgcagggcgtccagggaggaccccag

SEQ ID NO: 1055 - DNA, 390 bp, Homo sapiens
cctcttattagggctctggtagcggcggcggcggacccttggggtctggacgcaacggcggcgggagcatgaacgcccctccagccttcgagtcgttcttgctcttcgagggcgagaagaagatcaccattaacaaggacaccaaggtacccaatgcctgtttattcaccatcaacaaagaagaccacacactgggaaacatcattaaatcacaactcctaaaagacccgcaagtgctatttgctggctacaaagtcccccaccccttggagcacaagatcatcatccgagtgcagaccacgccggactacagcccccaggaagcctttgccaacgccatcaccgacctcatcagtgagctgtccctgctggaggagcgctttcgggtgg

SEQ ID NO: 1056 - DNA, 450 bp, Homo sapiens
  misc_feature 21, 22, 230, 232, 377, 391: n = A,T,C or G
ccagcatcaccttttggtccnnacactccagggctgccaggagcaccagtgttacccgcaggacctgggggcccatccttgcctggagaaccgctgggacctgggggtcctgggttaccattactaccaggaggaccaggaagaccacgagcaccagggaagccagcagcaccaggtccaccaggactgccacgttcacctttgacaccttggggaccaggaggaccagnangtccagaacctccagggggtcctgcaactccaggagggcctccttcacctttctcacccggagcccctctttctcctttaccaccaggttcaccattctgtccaggagcaccagggaaaccagcaggtcctggagggccagtttnacctctctcaccanggctaccacgaggtccagctatacctggaagtccgggggcaccaccttcacccttacct

SEQ ID NO: 1057 - DNA, 337 bp, Homo sapiens
tgagcggccgcccggcaggtcctcgcctggagggccccgggcagcacagggaggacgagcttgtccagcagagggtctggcagagggtcccgcagaggtttgggcagggggtctgacatccctggctcctgctctggctctggctgccgggatttgcacaggcccaggtgcatacagatgccgtttgagtcaatctggttctggaagtagtcgatgaccagggggaagtagtcgtcaagcacttggttgcactggggcatgagcagcttcaaggggaggacgttgcactcctgctccaggaacttcctcatcgtgtcctggaaaatggcctccttgg

SEQ ID NO: 1058 - DNA, 237 bp, Homo sapiens
ctggggactgggaatgctagcatatggtatctcaagttggctctcagaactaaacggggataagggcctagaatggaagagggaaccagccagaccctcagtccttcctgtcctggactgggagccacagatgtccctgtgatctgtcactgccctgatctgggtcttcagccattaaagctcagtgtcatcttcagtcaccaacgggggtcttggtgtccttccaaacccctttgg

SEQ ID NO: 1059 - DNA, 210 bp, Homo sapiens
  misc_feature 169, 170: n = A,T,C or G
agcccatccccccggctccctcctagtctgccctgcgtcctctgtccccgggtttcagagacaacttcccaaagcacaaagcagtttttccccctaggggtgggaggaagcaaaagactctgtacctactttgtatgtgtataataatttgagatgtttttaattattnngattgctggaataaagcatgtggaaatgacccaaaaaaaa

SEQ ID NO: 1060 - DNA, 564 bp, Homo sapiens
ctggccacagagcccagcaagtccttcctgggagagaagagttagggctgatactgaaggtctctttcacatctgggcacacgtctgccttcaggctgtaagaatttcatttgtcgattgttaaataaaaccaggagaaagcaatgcaggtctctgggaatctcatcccttccataaggaaaatgctctgccaattcaagtttcattcagtcaggaagacagaaggatttaaggcttcggtgacaattataatcctctgagaaattatttccccttaaagtcaagataagataatagtgtttactgtactttctcttgactcttgaaatccctggtattgggtgtaggcaacttgcacctgcaatgaagtccgcaggagaggaaggtctctcctcccccgaaagctatcccaggtcacatgcgtggcgaatgcccactgaacctcggctctcatggaagcaggaaagacaccgagattcaagccttctagtaggttgaggacgctgtgctcatggcatcttcggagattttggtactggcaggggtggatgcttgcaaaatact

SEQ ID NO: 1061 - DNA, 267 bp, Homo sapiens
cctatggaggtgcctatgatgtcatgagctctaagcacctttgtggtgataccaactatgcctggcccaccgcagagattgcggtcatgggagcaaagggcgctgtggagatcatcttcaaagggcatgagaatgtggaagctgctcaggcagagtacatcgagaagtttgccaaccctttccctgcagcagtgcgagggtttgtggatgacatcatccaaccttcttccacacgtgcccgaatctgctgtgacctggatgtcttgg

SEQ ID NO: 1062 - DNA, 603 bp, Homo sapiens
  misc_feature 533, 592: n = A,T,C or G
ctggtcatcttgtcatgtgaagaccatcttcctacagagtctaggctggccgtcgttgaagtcctcaccagtactacaccacttttcctcaccaacccccatcctattcttgagttgcaggatacacttgctctctggaagtgtgtccttacccttctgcagagtgaggagcaagctgttagagatgcagccacggaaaccgtgacaactgccatgtcacaagaaaatacctgccagtcaacagagtttgccttctgccaggtggatgcctccatcgctctggccctggccctggccgtcctgtgtgatctgctccagcagtgggaccagttggcccctggactgcccatcctgctgggatggctgttgggagagagtgatgacctcgtggcctgtgtggagagcatgcatcaggtggaagaagactacctgtttgaaaaagcagaagtcaacttttgggccgagaccctgatctttgtgaaatacctctgcaagcacctcttctgtctcctctcaaaagtccggctggcgtnccccaagccctgagatgctctgtcaccttcaaaggatggtgtcagagcagtgccacctnctgtctcagtt

SEQ ID NO: 1063 - DNA, 222 bp, Homo sapiens
ccatcgtggatcactgagatgcagtggcggtccccgtagctggcccgtggcatgccaccctggaagatggtgaagggcaacccctgcctagtggtcagccggaggattctggtaatcgctttgcaaggaaagggaccgtaaggcacgaggctgcggaggggctctggttgctgggcttcgctggacacgggccactggcagtagctgccgtcagagtgacag

SEQ ID NO: 1064 - DNA, 72 bp, Homo sapiens
  misc_feature 13, 14: n = A,T,C or G
gatgatcaatatnnactggaacacatgcatgcttttggaatgtataattacctgcactgtgattcatggtat

SEQ ID NO: 1065 - DNA, 251 bp, Homo sapiens
gtggccgtgatggatagcgacaccacaggcaagctgggctttgaggaattcaagtacttgtggaacaacatcaaaaggtggcaggccatatacaaacagttcgacactgaccgatcagggaccatttgcagtagtgaactcccaggtgcctttgaggcagcagggttccacctgaatgagcatctctataacatgatcatccgacgctactcagatgaaagtgggaacatggattttgacaacttcatcag

SEQ ID NO: 1066 - DNA, 289 bp, Homo sapiens
ctggagatgatcctcaacaagccagggctcaagtacaagcctgtctgcaaccaggtggaatgtcatccttacttcaaccagagaaaactgctggatttctgcaagtcaaaagacattgttctggttgcctatagtgctctgggatcccaccgagaagaaccatgggtggacccgaactccccagtgctcttggaggacccagtcctttgtgccttggcaaaaaagcacaagcgaaccccagccctgattgccctgcgctaccagctacagcgtggggttgtggtcctgg

SEQ ID NO: 1067 - DNA, 301 bp, Homo sapiens
ctgtagttgactgaagtcgctaaacaggacggatttaagtagaggtgatatgtccagtcaccggcatagagacgtcctctgcgtcaccatccacacacagggcttctggtagacatcaggcaaagctctccatgttaatattcatctgaatatggataattagggtggctagcaaaactatcactgttaaaatagtggagatttctgtctaggccatctatggctttcatgtcctccgcagtcaactggaactcaaaaacctgcacgttctgtctgatgcgctgctcattgtagctcttgg

SEQ ID NO: 1068 - DNA, 255 bp, Homo sapiens
ccagcagttcctctttgccttatatttgtggtacgcccggccagccttcaagatgggtttgtcaattcggccacctccagccaccacaccaaccacagctctgttggctgaggagataaccttcttggagccggagggcagcttcacacgggtcttcttggtctcagggttgtgggagataacggtggcatagttccctgatgcccgggccagcttgccacggtctccaggcttctcctccaggcagcacacgat

SEQ ID NO: 1069 - DNA, 77 bp, Homo sapiens
ctggacaggctccagcaccggcccaaacacgcccagacctcggcaggcaccacctggttctcccacccagaaagttc

SEQ ID NO: 1070 - DNA, 163 bp, Homo sapiens
  misc_feature 12, 108, 109, 137, 147, 148: n = A,T,C or G
ctgctgggatgnctgccaagtttttcagccataaggtagcgaaatctagcagaatccagattacatccacttccaatcacgcggtgtttgggtaatccacctagtttnnaggtaacatacgtaagaatgtccactgngttggaaacnncaattatgatgcaat

SEQ ID NO: 1071 - DNA, 246 bp, Homo sapiens
  misc_feature 14: n = A,T,C or G
ctgaccggaccggncatgcccgtccggaacgtctataagaaggagaaagctcgagtcatcactgaggaagagaagaatttcaaagccttcgctagtctccgtatggcccgtgccaacgcccggctcttcggcatacgggcaaaaagagccaaggaagccgcagaacaggatgttgaaaagaaaaaataaagccctcctggggacttggaatcagtcggcagacaaaaaaaaaaaaaaaaaaacaaa

SEQ ID NO: 1072 - DNA, 224 bp, Homo sapiens
  misc_feature 143: n = A,T,C or G
ctgccctgacagagcgctccttgatgggcatggactggaaaggatcccaggaatacaagaaggcagaaaaaaaagtttggaagatctttaaatctgacagtgaagtggctggttacatccggcaagcgggtgacttccatcangtaattattcgaggtggaggacatattttaccctatgaccagcctctgagagcttttgacatgattaatcgattcatttat

SEQ ID NO: 1073 - DNA, 301 bp, Homo sapiens
ctgtagttgactgaagtcgctaaacaggacggatttaagtagaggtgatatgtccagtcaccggcatagagacgtcctctgcgtcaccatccacacacagggcttctggtagacatcaggcaaagctctccatgttaatattcatctgaatatggataattagggtggctagcaaaactatcactgttaaaatagtggagatttctgtctaggccatctatggctttcatgtcctctgcagtcaactggaactcaaaaacctgcacgttctgtctgatgcgctgctcattgtagctcttgg

SEQ ID NO: 1074 - DNA, 132 bp, Homo sapiens
  misc_feature 41, 47, 56, 69, 78, 93: n = A,T,C or G
caagctttttttttttttttttttttttttttcgctcaaanactttnttttattantacatgggctggnattgatggnaagggacaaatgtanttggcaaccatggttagcatcggatgcccatcccaatgg

SEQ ID NO: 1075 - DNA, 301 bp, Homo sapiens; identical to SEQ ID NO: 1073

SEQ ID NO: 1076 - DNA, 436 bp, Homo sapiens
ctgctgggatgaatgccaagtttttcagccataaggtagcgaaatctagcagaatccagattacatccacttccaatcacgcggtgtttgggtaatccacctagtttccaggtaacatacgtaagaatgtccactgggttggaaaccacaattatgatgcaatcaggactgtacttgacgatctgaggaataatgaatttgaagacattaacatttctctgcaccagattgagccgactctccccttcttgctgacggactcctgcagttactactacaatcttagaattggcggtcacagaataatctttatctgccacaattttaggtgtctgaagaaataagctcccatgctgcagatccatcatttctcctttaagcttatcttccaaaacatccacaagagcaagttcatcagccagagactttcccagaa

SEQ ID NO: 1077 - DNA, 256 bp, Homo sapiens
ctgaagattaataggaaacagtgaaaaagcaacgtcctgtgatcagtaactttaaagacaagcttggttctctctttctggcactactgacattcccaccattctagcttccgaattctggaaaaagagaagatgattaacaaaaatagagaatgtagaaacttctggttttgtgcctacaggattggcaccagaccctcagtgctcacttgctccatctacaaggcagcacccctcccagaggcagccagggagg

SEQ ID NO: 1078 - DNA, 202 bp, Homo sapiens
  misc_feature 8, 10, 26, 67, 71, 77, 84, 93, 127, 133, 144: n = A,T,C or G
ctgtgctncncaaccagatccatgtnaagtgccccgcccagagaagggagccagggggagctgactncagncaacanccagtgnccggatgancaccaacatgtgaggggtgaaccttggcctccangacatntgcaccccctncccacctccacggacctcggacctccaggcggctcagtgctgcctgcggcccagctaa

SEQ ID NO: 1079 - DNA, 170 bp, Homo sapiens
gcgcttctcgggcaccgtcaggcttaagtccactccccgccctaagttctctgtgtgtgtcctgggggaccagcagcactgtgacgaggctaaggccgtggatatcccccacatggacatcgaggcgctgaaaaaactcaacaagaataaaaaactggtcaagaagctgg

SEQ ID NO: 1080 - DNA, 494 bp, Homo sapiens
cctgcggcaaagagatgcgcttattgagaaacatggcttagttataatccccgatggcactcccaatggtgatgtcagtcatgaaccagtggctggagccatcactgttgtgtctcaggaagctgctcaggtcttggagtcagcaggagaagggccattagatgtaaggctacgaaaacttgctggagagaaggaagaactactgtcacagattagaaaactgaagcttcagttagaggaggaacgacagaaatgctccaggaatgatggcacagtgggtgacctggcaggactgcagaatggctcagacttgcagttcatcgaaatgcagagagatgccaatagacaaattagcgaatacaaatttaagctttcaaaagcagaacaggatataactaccttggagcaaagtattagccggcttgagggacaggttctgagatataaaactgctgctgagaatgctgaggaaagttgaagatgaattgaaagca

SEQ ID NO: 1081 - DNA, 123 bp, Homo sapiens
ctgctgctattaagttgcaagctctacagctagctacatgactgatggatcagtttgagatttgttcccttgtcaaaagtttaactctgatagaaggttggcctcacattctgatgtttggac

SEQ ID NO: 1082 - DNA, 297 bp, Homo sapiens; identical to SEQ ID NO: 389

SEQ ID NO: 1083 - DNA, 452 bp, Homo sapiens
ctgggccacgaggacaccaccagcttggatcggcctcgccgtgtggaatactttgtagataagcaactccaagtaaaggctgtcacctgtgggccgtggaacacctacgtgtatgctgtggagaaagggaagagctgacatgtgtacgtatatgtatatgcaacacctgtgagacccccattcaggtcaaggaaaaccattgcctgcaccccaagggccccatatttgcccctccccatcacagtcctgcccttcaccctcaagcacggtcctaaacttgtctgcactttagaaacacctggagagcattgaaaactctgctgcctaaggtcagcatcaatcaaaacaatgaaatcaatgaaacaatgaaaccagagcttctaggtgtgtggcctggatagtggtagattcaaagctccacccacctcatcccaggtacatttgatgtgcag

SEQ ID NO: 1084 - DNA, 301 bp, Homo sapiens
ctgtagttgactgaagtcgctaaacaggacggatttaagtagaggtgatatgtccagtcaccggcatagagacgtcctctgcgtcaccatccacacacagggcttctggtagacatcgggcaaagctctccatgttaatattcatctgaatatggataattagggtggctagcaaaactatcactgttaaaatagtggagatttctgtctaggccatctatggctttcatgtcctctgcagtcaactggaactcaaaaacctgcacgttctgtctgatgcgctgctcattgtagctcttgg

SEQ ID NO: 1085 - DNA, 369 bp, Homo sapiens
ctgtttcccatgggccaccaggcggctcaggacagcaaacgtctcatcccctctcaggatgtacttctccatgtcctgctcgatccactggtacatgaggcccttcacatgcacgtctcggatggcgtccgtcacgtccttgtagagatgtgcttggtcaaactccaggctgtggcccagaaagtagtccaccacacaggacagcagagccatctccggtagcgagaagatgtccatgaactgcttaatggagggacccttgccatagaagccactcatctggtatagtgggatgtgctgggtacccccatacagctcaatcacctcctcgtctggcacaggctggaggcccctgtaggctgtccccag

SEQ ID NO: 1086 - DNA, 316 bp, Homo sapiens
cctcagaggtttctccacagtcctcttctgggcaaattcttgtttcttcacatgccggactagcttaagaccaatgcagtagcttatttccaagccttgcaaagtatataatatctaagaggaaaggttttgtcatcccagcgttgtccactttgtggggctttgtaggtagacggagccacactacaggcagggtatgagcagagggatgtatggagtgtgggtgactctgagcctcactgccgctgcaaggtggggaaactgtaagtgaacccctgtgggtgcgggggagggtatccggtgcgcagggaggtgg

SEQ ID NO: 1087 - DNA, 329 bp, Homo sapiens
cctgcaggggatgggaccttccagaagtgggcgtctgtggtggtgccttctggacaggagcagagatacacctgccatgtgcagcatgagggtctgcccaagcccctcaccctgagatgggagccgtcttcccagcccaccatccccatcgtgggcatcattgctggcctggttctctttggagctgtgatcgctggagctgtggtcgctgctgtgatgtggaggaggaagagctcagatagaaaaggagggagctactctcaggctgcaagcagtgacagtgcccagggctctgatatgtctcccacagcttgtaaagtgtgagacag

SEQ ID NO: 1088 - DNA, 342 bp, Homo sapiens
ccactcactgctgggacccaggcacctcccttctccatcctctctggattgtcagtaatgtcctggaacagaagcctgtgggatggccttgggcacggagaagccctggggtcagtgtcgtgcacggatggcggcagtgttgaacccaggaggctgaacccggcccaccacggaagatgagtgcatggcaaccgcctgccttcacgtcgctccacttggtaaccccaaggtctgggctgttctaggtattgcttcacgtgccccagcaagcccttaacaagagggcctggttccctgaagaaccaatcccaggaaggggccttgatccctccgccttgctga

SEQ ID NO: 1089 - DNA, 51 bp, Homo sapiens
  misc_feature 18: n = A,T,C or G
ccttgtgttcagtctccncgctcttcttgccactgttgagggtggagatgt

SEQ ID NO: 1090 - DNA, 515 bp, Homo sapiens
cctggggaggccctaggggagcaccgtgatggagaggacagagcaggggctccagcaccttctttctggactggcgttcacctccctgctcagtgcttgggctccacgggcaggggtcagagcactccctaatttatgtgctatataaatacgtcagatgtacatagagatctattttttctaaaacattcccctccccactcctctcccacagagtgctggactgttccaggccctccagtgggctgatgctgggacccttaggatggggctcccagctcctttctcctgtgaatggaggcagagacctccaataaagtgccttctgggctttttctaacctttgtcttagctacctgtgtactgaaatttgggcctttggatcgaatatggtcaagaggttggaggggaggaaaatgaaggtctaccaggctgagggtgagggcaaaggctgacgaagagggaaagttacagatttcctgtagcaggtgtgggcttacagacacatggactgg

SEQ ID NO: 1091 - DNA, 277 bp, Homo sapiens
gcgtcccggagcccacggtggtcatggctgccagagcgctctgcatgctggggctggtcctggccttgctgtcctccagctctgctgaggagtacgtgggcctgtctgcaaaccagtgtgccgtgccagccaaggacagggtggactgcggctacccccatgtcacccccaaggagtgcaacaaccggggctgctgctttgactccaggatccctggagtgccttggtgtttcaagcccctgcaggaagcagaatgcaccttctgaggcacctccag

SEQ ID NO: 1092 - DNA, 368 bp, Homo sapiens; identical to SEQ ID NO: 1044

SEQ ID NO: 1093 - DNA, 459 bp, Homo sapiens
ctgtgcatggagccatttggatggcggcgggcggggggggattctctgtatcaggagtgactttgttgccccacacagcctcctgctgcaggtgctttggaaagagatgctgccttggagctggtgaatctgtggaccacattcaagggtgtggcacaggcatcttcccatccttttcactccgaatcgctggcgacacattctcctttccagctaggaaagggttcctcgcggctggtttagattgtggttgtttgttttgcttctactaagactgttttgtttcaaaaaggaaacaagttttgtgtttgctgtctacgctggagtcctgaactgtgggtagaaaacacgacctggctttgtagaaaggacacagggctgttttatgaactaagcggtgaggctcaggtggcggctctcacagagcccctgatgctgttgttctttgagggcttaagg

SEQ ID NO: 1094 - DNA, 610 bp, Homo sapiens
  misc_feature 590: n = A,T,C or G
ccatgcaaaaggaggtggtgcactcagtgcagtcgctgccacaaaaagtccgattattttcattggtacaggggaacatatagatgactttgaacctttcaaaacacagccttttattagcaaacttcttggtatgggcgacattgaaggactgatagataaagtcaacgagttgaagttggatgacaatgaagcacttatagagaagttgaaacatggtcagtttacgttgcgagacatgtatgagcaatttcaaaatatcatgaaaatgggccccttcagtcagatcttggggatgatccctggttttgggacagattttatgagcaaaggaaatgaacaggagtcaatggcaaggctaaagaaattaatgacaataatggatagtatgaatgatcaagaactagacagtacggatggtgccaaagtttttagtaaacaaccaggaagaatccaaagagtagcaagaggatcgggtgtatcaacaagagatgttcgagaacttttgacacaatataccaagtttgcacagatggtaaaaaagatgggaggtatcaaaggacttttcaaaggtgggcgacatgtctaanaatgtgagccagtcacagat

SEQ ID NO: 1095 - DNA, 232 bp, Homo sapiens
ccttatttctcttgtcctttcgtacagggaggaatttgaagtagatagaaaccgacctggattactccggtctgaactcagatcacgtaggactttaatcgttgaacaaacgaacctttaatagcggctgcaccatcgggatgtcctgatccaacatcgaggtcgtaaaccctattgttgatatggactctagaataggattgcgctgttatccctagggtaacttgttccg

SEQ ID NO: 1096 - DNA, 377 bp, Homo sapiens
ccacgctcatggaaaccacccaaggacagccagagtccacattccctggcaagctgggtgtattcttccaaaagtttcccacccagtggttcagacaggtgtagcgtctctgcagggtcccgtgcaatgaagtcaaatgcctcaggcaggaaagccaggcaggcacccagtctggcagcctctcgaaccagcccagcacatgttttaaagttctgttgcttgtctggcgtcgatgttacctggcacacagccaccaggggcagttcgcaggaggaagaggagatagccatggctctgggcctgggctgagcacaaagtactgagagttgaggtatccggagtccaggacacagaagggacaggaatctgtgaggagg

SEQ ID NO: 1097 - DNA, 311 bp, Homo sapiens
ccacgccatggggctggagcactcccaagaccctggggccctgatggcacccatttacacctacaccaagaacttccgtctgtcccaggatgacatcaagggcattcaggagctctatggggcctctcctgacattgaccttggcaccggccccacccccacactgggccctgtcactcctgagatctgcaaacaggacattgtatttgatggcatcgctcagatccgtggtgagatcttcttcttcaaggaccggttcatttggcggactgtgacgccacgtgacaagcccatggggcccctgctggtgg

SEQ ID NO: 1098 - DNA, 404 bp, Homo sapiens
ccacccacgcttaggttcccatcacactgatgactccgggtttggcgagcacaggagcgcaaaccttttcacattctttctgtgatccaaatttgttttcgtttccaccacaacctccataccagaatcttgcacagcttttggtgtttggatcatagtaccattttaatatgaaatccctgcaagttccttcgtctttcggcaacttgcatatatctgtttcagtgagagccaatggttctgtgctcaccattagattgatggttgaactagaagctgaccttgctggctgtggaggtgggggctgagatttctttgtactgaaacttccgtggtaggtggctctgacctgagacctcaggtagcagaccacagccacatggtatgtctgcccagcgagcagg

SEQ ID NO: 1099 - DNA, 442 bp, Homo sapiens
ccatgggatggctcttctgaccattgggggccaggccaggccaggccaggcttagggtagcaaggaccaggccaaaggggcagggcctcctttggaggggttgaggggtacatcctcggctggtgtttgcatccaggggtccagcaggatctcttccagtgagggtcgggaagaaggtttgggggccaggcaccggcggattagggcacagcagtctggggagacatgggctgggaagtggagctcagcttccagaatctcctggtccctctcaaagggaatgtccccacacaccatgtcatagaggaggatgcccagtgaccagacagtggccgggagtgcatggtactggtgtcgagagatccactctggggggctgtacacccttgtcccatcaaagtcagtgtagggttcatcatgaagcagggcaccaggaaccaaa

SEQ ID NO: 1100 - DNA, 191 bp, Homo sapiens
ccacgaaaatcaatgagaagccacaggtgatcgcggactatgagagcggacgggccatacccaataaccaggtgcttggcaaaatcgagcgggccattggcctcaagctccggggaaaggacattggaaagcccatcgagaaggggcctagggcgaaatgaacacaaagcctcgaaatcagtgcgctccag

SEQ ID NO: 1101 - DNA, 178 bp, Homo sapiens
cgggtactttggtggacatgaaggaactgggcatatgggagccattggctgtgaagctgcagacttataagacagcagtggagacggcagttctgctactgcgaattgatgacatcgtttcaggccacaaaaagaaaggcgatgaccagagccggcaaggcggggctcctgatgctgg

SEQ ID NO: 1102 - DNA, 209 bp, Homo sapiens
agccaggctagtgacagaaatggattcgaaatatcagtgtgtgaagctgaatgatggtcacttcatgcctgtcctgggatttggcacctatgcgcctgcagaggttcctaaaagtaaagctttagaggccaccaaattggcaattgaagctggcttccgccatattgattctgctcatttatacaataatgaggagcaggttggactgg

SEQ ID NO: 1103 - DNA, 396 bp, Homo sapiens
  misc_feature 351: n = A,T,C or G
ctatagggctcgagggccgcccgggcaggtggtgcctctaatactggtgatgctagaggtgatgtttttggtaaacaggcggggtaagatttgccgagttccttttactttttttaacctttccttatgagcatgcctgtgttgggttgacagtgggggtaataatgacttgttggttgattgtagatattgggctgttaattgtcagttcagcgttttaatctgacgcaggcttatgcagaggagaatgttttcatgttacttatactaacattagttcttctatagggtgatagattggtccaattgggtgtgaggagttcagttatatgtttgggattttttaggtantgggtgttgagcttgaacgctttcttaattggtggctgctttagg

SEQ ID NO: 1104 - DNA, 342 bp, Homo sapiens
  misc_feature 224, 226, 302: n = A,T,C or G
ctgctgatacccaggcagtagctgatgctgtcacctaccagctcggtttccacagcattgaactgaatgagcctccactggtccacacagcagccagcctctttaaggagatgtgttaccgataccgggaagacctgatggcgggaatcatcatcgcaggctgggaccctcaagaaggagggcaggtgtactcagtgcctatggggggtatgatggtaaggcantnctttgccattggaggctccgggagctcctacatctatggctatgttgatgctacctaccgggaaggcatgaccaangaagagtgtctgcaattcactgccaatgctctcgctttgg

SEQ ID NO: 1105 - DNA, 551 bp, Homo sapiens
ctggggccactgtcggcatcatgattggagtgctggttggggttgctctgatatagcagccctggtgtagtttcttcatttcaggaagactgacagttgttttgcttcttccttaaagcatttgcaacagctacagtctaaaattgcttctttaccaaggatatttacggaaaagactctgaccagagatcgagaccatcctagccaacatcgtgaaaccccatctctactaaaaatacagaaattagctggacatggtggcatgtgcctgtaatcccagctactcaggaggctgaggcaggagaactgcttgaacagggacccgggaggcggagattggagtgagccgagatcgcgccactgcactccagtctgggctacacagtgagactctgtctcaagaaaaataaacagaagaattgggggttgggggtgggaaacagtgtttccaggcagagagaacagcacgtacaaaggagactgttgggagggttaaatgaaataattcatgtaaggtacttagtaccacacatgaatttcacaagcagcag

SEQ ID NO: 1106 - DNA, 280 bp, Homo sapiens
ctgctcttcacacagggttctggggaaaacaaggaagagatcatcaattatgaatttgacaccaaggacctggtgtgcctgggcctgagcagcatcgttggcgtctggtacctgctgaggaagcactggattgccaacaacctttttggcctggccttctcccttaatggagtagggctcctgcacctcaacaatgtcagcactggctgcatcctgctgggcggactcttcatctacgatgtcttctgggtatttggcaccaatgtgatggtgacagtgg

SEQ ID NO: 1107 - DNA, 570 bp, Homo sapiens
ctgattagtgtctaaggaatggtccaatactgttgcccttttccttgactattacactgcctggaggatagcagagaagcctgtctgtacttcattcaaaaagccaaaatagagagtatacagtcctagagaattcctctatttgttcagatctcatagatgacccccaggtattgtcttttgacatccagcagtccaaggtattgagacatattactggaagtaagaaatattactataattgagaactacagcttttaagattgtacttttatcttaaaagggtggtagttttccctaaaatacttattatgtaagggtcattagacaaatgtcttgaagtagacatggaatttatgaatggttctttatcatttctcttccccctttttggcatcctggcttgcctccagttttaggtcctttagtttgcttctgtaagcaacgggaacacctgctgagggggctctttccctcatgtatacttcaagtaagatcaagaatcttttgtgaaattatagaaatttactatgtaaatgcttgatggaattttttcctgctagtgtagct

SEQ ID NO: 1108 - DNA, 386 bp, Homo sapiens
ctgttcctgcggtgacactgtataaacacgatgaccctgccttgactttagttgctggtcttacatcaaataagcccacagacaaactccgtgccctgcctctgtggttatctttacaatacttgggacttgatgggtttgtggagaggatcaagcatgcctgtcaactgagtcaacggttgcaggaaagtttgaagaaagtgaattacatcaaaatcttggtggaagatgagctcagctccccagtggtggtgttcagatttttccaggaattaccaggctcagatccggtgtttaaagccgtcccagtgcccaacatgacaccttcaggagtcggccgggagaggcactcgtgtgacgcgctgaatcgctggctgggagaacag

SEQ ID NO: 1109 - DNA, 409 bp, Homo sapiens
ctctggtctgtaaccagtctcttcaaggcattatctcctggggccaggatccgtgtgcgatcacccgaaagcctggtgtctacacgaaagtctgcaaatatgtggactggatccaggagacgatgaagaacaattagactggacccacccaccacagcccatcaccctccatttccacttggtgtttggttcctgttcactctgttaataagaaaccctaagccaagaccctctacgaacattctttgggcctcctggactacaggagatgctgtcacttaataatcaacctggggttcgaaatcagtgagacctggattcaaattctgccttgaaatattgtgactctgggaatgacaacacctggtttgttctctgttgtatccccagccccaaagacagctcctgg

SEQ ID NO: 1110 - DNA, 215 bp, Homo sapiens; identical to SEQ ID NO: 890

SEQ ID NO: 1111 - DNA, 308 bp, Homo sapiens
cctgggcccgctgacttcagggtgaggccacagctactgcagcgctttttatttatttatttatttactgagatggagtcttgctctgtcacccaggctggagtgcagtggtgcaatctcggctcactgcaacctctgcctcctgggctgcagtgattctcctgcgttcaagtaattctcctgcctcggccttctgagtagttgggattacaggcatatgccaccacacttggctaattttttgtatttttagtagaaatggggtttcaccatgttggcgaggctggtctcgaactcctgacctcaag

SEQ ID NO: 1112 - DNA, 177 bp, Homo sapiens
ccactggctccctgggccagggcctcggggccgcttgtgggatggcctacaccggcaaatacttcgacaaggccagctaccgagtctattgcttgctgggagacggggagctgtcagagggctctgtatgggaggccatggccttcgccagcatctataagctggacaaccttgtgg

SEQ ID NO: 1113 - DNA, 646 bp, Homo sapiens
  misc_feature 529, 580, 622: n = A,T,C or G
ccccaccatggacacactttgctacacactcctgctgctgaccaccccttcctgggtcttgtcccaggtcaccttgaaggagtctggtcctgtactggtgaaacccacagagaccctcacgctgacctgcaccgtctctgggttttcactcagtaatattagagtgggtgtgagttggatccgtcagcccccagggaaggccctggagtggtttgcatacattttttcgactgacgaaaaatccttcaattcatctctgaagaacaggctcaccatctccaaggacacctctaaaagccaggtggtccttagcatgaccaacatggaccctgtggacacagccacatattactgtgcacggctctctatttacttcggggagttagaaacctaccaatacatggacgtctggggcaaagggaccaccgccaccgtctcctcagcatccccgaccagccccaaggtcttcccgctgagcctctgcagcacccagccagatgggaacgtggtcatcgcctgcctggtccanggcttcttcccccaggagccactcagtgtgacctggagcgaaagcggacanggcgtgaccgccagaaacttccccacccagccaggatgcctncggggacctgtacaccacgagcag

SEQ ID NO: 1114 - DNA, 420 bp, Homo sapiens
tgttgttttactcacctaacccttagaaaatgaatgttagaaggtgcctgccgaggcgggacagagtgttcgctcgcgctggagaaggctctgctcagccctgagagtcccttcctgccccaccgatactggcactttaaaaaggaagctgaccgcacagtgtccagacgaattggcccccagaagatggggagttctgtcctgcccttctgtgtctgcgtgacctcacccagcctaggagggaggtgcattcagggtagatttgcctctcattcaaagttctggggctttgggtggaaaacagccagctttggcgctgttggggagactcctccagaccaggaaccccagaaggagacagagcctgccacatcctcccacgccaggccctgggccagggtgattggactgagaatttgg

SEQ ID NO: 1115 - DNA, 416 bp, Homo sapiens
ctgaaagtttctaaaatagaaacctggtgcatatggccccaaaacaccacatgctttgattacactcagggagcatgagttgcctatttgggtgagaaaatcccatgttacagtgcgatcgctgggcacgttttggagtaattccagccactgctatgtaagtgtttttaattcaggggtgtcttctacgttttcatcttctgaatatcttgtgacggtgcaggtttgagcaaaactggcatgaaatgagagctgttttagatgaagattgcaagatggatggcttggcccacagtggcagtgggttgggggtggaatgtggacaattaggaaaaaggcatgtcattctatctggctcctggagaggcagatagtcctgggggctttggtgtcacagttcccaaaagcaaggttgg

SEQ ID NO: 1116 - DNA, 382 bp, Homo sapiens
ccttatttctcttgtcctttcgtacagggaggaatttgaagtagatagaaaccgacctggattactccggtctgaactcagatcacgtaggactttaatcgttgaacaaacgaacctttaatagcggctgcaccatcgggatgtcctgatccaacatcgaggtcgtaaaccctattgttgatatggactctagaataggattgcgctgttatccctagggtaacttgttccgttggtcaagttattggatcaattgagtatagtagttcgctttgactggtgaagtcttagcatgtactgctcggaggttgggttctgctccgaggtcgccccaaccgaaaatttttaatgcaggcttggtagtttaggacctgtgggtttg

SEQ ID NO: 1117 - DNA, 370 bp, Homo sapiens
ctgcgtgtctgaaaaccaaagatttaaaacatagtaattattgaacctcagaagaaaaactcagattgaaagagcttagaataagaccctttttgagttgagaaaggtgagtacttagatttttcatttgctttgtttgggattacttacatcagtattttatgttgatcagaaagaaaggattcaattagctattgttcggttaataaaaatgtcagccactgtaggagtaagttggatgtccagcctttttagattgcttaacttggaaacactggactgggagcggtggctcatgcctgtgatcccagcactctgggaggccaaggcaggcagatcactggaggtcaggagtttgagaccaacctgg

SEQ ID NO: 1118 - DNA, 494 bp, Homo sapiens
ctgtctcttacttttaaccagtgaaattgacctgcccgtgaagaggcgggcataacacagcaagacgagaagaccctatggagctttaatttattaatgcaaacagtacctgacaaacccacaggtcctaaactaccagacctgcattaaaaatttcggttggggcgacctcggagcagaacccaacctccgagcagtacatgctaagacttcaccagtcaaagcgaactactatactcaattgatccaataacttgaccaacggaacaagttaccctagggataacagcgcaatcctattctagagtccatatcaacaatagggtttacgacctcgatgttggatcaggacatcccgatggtgcagccgctattaaaggttcgtttgttcaacgattaaagtcctacgtgatctgagttcagaccggagtaatccaggtcggtttctatctacttcaaattcctccctgtacgaaaggacaagagaaataagg

SEQ ID NO: 1119 - DNA, 407 bp, Homo sapiens
ccttatgactacaacggcccacgagaaaaatatggaatcgttgattacatgatcgagcagtccgggcctccctccaaggagattctgaccctgaagcaggtccaggagttcctgaaggatggagacgatgtcatcatcatcggggtctttaagggggagagtgacccagcctaccagcaataccaggatgccgctaacaacctgagagaagattacaaatttcaccacactttcagcacagaaatagcaaagttcttgaaagtctcccaggggcagtcggttgtaatgcagcctgagaaattccagtccaagtatgagccccggagccacatgatggacgtccagggctccacccaggactcggccatcaaggacttcgtgctgaagtacgccctgcccctggttgg

SEQ ID NO: 1120 - DNA, 548 bp, Homo sapiens
  misc_feature 513: n = A,T,C or G
ccccagaggacccgttggacccagtggacctcctggcaaagatggaaccagtggacatccaggtcccattggaccaccagggcctcgaggtaacagaggtgaaagaggatctgagggctccccaggccacccagggcaaccaggccctcctggacctcctggtgcccctggtccttgctgtggtggtgttggagccgctgccattgctgggattggaggtgaaaaagctggcggttttgccccgtattatggagatgaaccaatggatttcaaaatcaacaccgatgagattatggcttcactcaagtctgttaatggacaaatagaaagcctcattagtcctgatggttctcgtaaaaacccagctagaaactgcagagacctgaaattctgccatcctgaactcaagagtggagaatactgggttgaccctaaccaaggatgcaaattggatgctatcaaggtattctgtaatatggaaactggggaaacatgcataagtgccaatccttngaatgttccacggaaacactggtggacagattcta

SEQ ID NO: 1121 - DNA, 278 bp, Homo sapiens
cggccgaggtccgccatggcgtgtgctcgcccactgatatcggtgtactccgaaaagggggagtcatctggcaaaaatgtcactttgcctgctgtattcaaggctcctattcgaccagatattgtgaactttgtttacaccaacttgcgcaaaaacaacagacagccctatgctgtcagtgaattagcaggtcatcagactagtgctgagtcttggggtactggcagagctgtggctcgaattcccagagttcgaggtggtgggactcaccgctctgg

SEQ ID NO: 1122 - DNA, 591 bp, Homo sapiens
ctgcagcggcagaggcagcatccagcggcggcgccagcagttccagtccgttgctttactttttgcttcaccgacatagtcattatgccgaagagaaagtctccagagaatacagagggcaaagatggatccaaagtaactaaacaggagcccacaagacggtctgccagattgtcagcgaaacctgctccaccaaaacctgaacccaaaccaagaaaaacatctgctaagaaagaacctggagcaaagattagcagaggtgctaaagggaagaaggaggaaaagcaggaagctggaaaggaaggcacagaaaactgaatctgtagataacgagggagaatgaattgtcatgaaaaattggggttgattttatgtatctcttgggacaacttttaaaagctatttttaccaagtattttgtaaatgctaattttttaggactctactagttggcatacgaaaatatataaggatggacattttatcgtctcatagtcatgctttttggaaatttacatcatcctcaagtaaaataaatatcagttaaatattggaagctgtgtgtaagattgattcagcattccatgcact

SEQ ID NO: 1123 - DNA, 454 bp, Homo sapiens
ccaattgaaacaaacagttctgagaccgttcttccactactgattaagagtggggtggcaggtattagggataatattcatttagccttctgagctttctgggcagacttggtgaccttgccagctccagcagccttcttgtccactgctttgatgacacccaccgcaactgtctgtctcatatcacgaacagcaaagcgacccaaaggtggatagtctgagaagctctcaacacacatgggcttgccaggaaccatatcaacaatggcagcatcaccagacttcaagaatttagggccatcttccagctttttaccagaacggcgatcaatcttttccttcagctcagcaaacttgcatgcaatgtgagccgtgtggcaatccaatacaggggcatagccggcgcttatttggcctggatggttcaggataatcacctgagcagtgaagccag

SEQ ID NO: 1124 - DNA, 219 bp, Homo sapiens
cctgctccagagcacggctgaccatttctgctccgggatctcagctcccgttccccaagcacactcctagctgctccagtctcagcctgggcagcttccccctgccttttgcacgtttgcatccccagcatttcctgagttataaggccacaggagtggatagctgttttcacctaaaggaaaagcccacccgaatcttgtagaaatattcaaactaat

SEQ ID NO: 1125 - DNA, 246 bp, Homo sapiens
ccagagctgggcccaagctgcgctggaatcgcagcaggagaggggagtgggctggttcttcccaccacttcccaggctctgacagccgagactcatttccaaggcacagcagctttctaaagggactgagtttggactgggttttggacctccaggggctggagcttcatcacctgggcagtgtcttttctcagagagcaggtttctttatagtttggaaataaatggttcacggttcaaaagaaa

SEQ ID NO: 1126 - DNA, 227 bp, Homo sapiens
ccattgttcccgtgcatcgaagcttgcaggcagcttcaggtcctcggtaaacataactctctggggtggcttgggcccacccaggaaggtaccacatagcctcttcaagtagctcatgtccacgttgtagaagttgtggccggcctgccacgtggtattccgtttgttgacatagttgaccagctcatccgacaggggatggaaagagggcctgctccgggcattgg

SEQ ID NO: 1127 - DNA, 377 bp, Homo sapiens
cctgccgtcgatgccagggaggccgacaggaccttcttttccagcggggccgatatttccaggggaaccaggaagacctctgggtcccatgagaccaggctccccagggcgaccagcatctccattaggtcctcggactccagcagggccacttgcaccacgactaccaggagggcccatgacgccagctctgccatcagctccaggaagaccacgagaaccaggactacctctcagcccaggaggtcctggagggccggcagatccagcttccccattagggcctctctttccttcttcaccactgggaccaggaggaccttggggcccagcagagccgggctcacccttgttaccgctctctcctttggagccag

SEQ ID NO: 1128 - DNA, 253 bp, Homo sapiens
gagagctattgctttgttaagatataaaaaggggtttctttttgtctttctgtaaggtggacttccagcttttgattgaaagtcctagggtgattctatttctgctgtgatttatctgctgaaagctcagctggggttgtgcaagctagggacccattcctgtgtaatacaatgtctgcaccaatgctaataaagtcctattctcttttatgagaaagaaaaagacactgtcctttaaagtgctgcagtatgg

SEQ ID NO: 1129 - DNA, 314 bp, Homo sapiens
ccaagagctacaatgagcagcgcatcagacagaacgtgcaggtgtttgaattccagttgacttcagaggagatgaaagccatagatggcctaaacagaaatgtgcgatatttgacccttgatatttttgctggccccccaattatccattttctgatgaatattaacatggagggcattgcatgaggtctaccagaaggccctgcgtgtggatggtgacacagaggatggctctatgctggtgactggacacatcgcctctggttaaatctctcctgcttggtgatttcagcaagctacagcaaagcccattgg

SEQ ID NO: 1130 - DNA, 239 bp, Homo sapiens
ccagtccaacctgctcctcattattgtataaatgagcagaatcaatatggcggaagtcagcttcaattgccaatttggtggcctctaaagctttacttttaggaacctctgcaggcgcataggtgccaaatcccaggacaggcatgaagtgaccatcattcagcttcacacactgatatttcgaatccatttctgtcactagcctggctagcaaatgtttcttcctccctcacaggcta

SEQ ID NO: 1131 - DNA, 402 bp, Homo sapiens
aaggagtcctgcttatcacaatgaatgttctcctgggcagcgttgtgatctttgccaccttcgtgactttatgcaatgcatcatgctatttcatacctaatgagggagttccaggagattcaaccaggaaatgcatggatctcaaaggaaacaaacacccaataaactcggagtggcagactgacaactgtgagacatgcacttgctacgaaacagaaatttcatgttgcacccttgtttctacacctgtgggttatgacaaagacaactgccaaagaatcttcaagaaggaggactgcaagtatatcgtggtggagaagaaggacccaaaaaagacctgttctgtcagtgaatggataatctaatgtgcttctagtaggcacagggctcccaggccaggac

SEQ ID NO: 1132 - DNA, 304 bp, Homo sapiens
ccaccccggagatgacacgaggctcacatgactctagacacttggtggaaagtgaggcgagaaaaacaatgacttgggccaattacacgactgcaaagctagagctgccaacagggctccagggagcttggcttctgtagaagttctaaggaagcggtacgaactccacggcggtggggcgctaactagcagggacccctgcaagtgttggtcgggggcctcgagctgcctgagctgacacgaggggaggggtctgtgtagccaacaggtgaccgaagggcttgcctgcccacagcttacttgg

SEQ ID NO: 1133 - DNA, 224 bp, Homo sapiens
ctgacattttctatagtagatatggaggaggtccaagactaactgtgaaagccctgtgtaaggaatgtgtagtagaacgttgtcgcatattgcgtctgaagaaccaactaaatgaagattataaaactgttaataatctgctgaaagcagcagtaaagggcagcgatggattttgggtggggaagtcctccttgcggagttggcgccagctagctcttgaacag

SEQ ID NO: 1134 - DNA, 250 bp, Homo sapiens
cctactctgctgaggtggcgcttcctgctaagggcccttctctgccctttctgccctccttcccatcccacatgctgagccgccacaaagaccaaagaagtgatggcttttctctgtcccctgctgctctgaggggagaggggtgggtctcctgagccactcagatgggaaagtcccttactcggcccctccctccccagcagccccaagctttacactggatgcagcgatcaacccaccactcaccagg

SEQ ID NO: 1135 - DNA, 315 bp, Homo sapiens
ccaatgggctttgctgtagcttgctgaaatcaccaagcaggagagatttaaccagaggcgatgtgtccagtcaccagcatagagccatcctctgtgtcaccatccacacgcagggccttctggtagacctcatgcaatgccctccatgttaatattcatcagaaaatggataattaggggggccagcaaaaatatcaagggtcaaatatcgcacatttctgtttaggccatctatggctttcatctcctctgaagtcaactggaattcaaacacctgcacgttccgtctgatgcgctgctcattgtagctcttgg

SEQ ID NO: 1136 - DNA, 377 bp, Homo sapiens; identical to SEQ ID NO: 1127

SEQ ID NO: 1137 - DNA, 250 bp, Homo sapiens
ctgttcaacttccaactctaaataggcaccattaaacaaaaaaccccagtattttaaatttctccagcacacattccaggatcaatgctctgaactgtaatcagctagtaattcataacgggaatacagccttagaatggaagctatattgcttccctgccccctttctcttacaattggagagtgtaggtattaagggatacaaagtcagaggaagaataattaaaaagaaaaatgcccaaagctgcag

SEQ ID NO: 1138 - DNA, 511 bp, Homo sapiens
  misc_feature 431: n = A,T,C or G
tcgaccaggtcctcctgggccatctggtccccgaggtcagcctggtgtcatgggcttccccggtcctaaaggaaatgatggtgctcctggtaagaatggagaacgaggtggccctggaggacctggccctcagggtcctcctggaaagaatggtgaaactggacctcagggacccccagggcctactgggcctggtggtgacaaaggagacacaggaccccctggtccacaaggattacaaggcttgcctggtacaggtggtcctccaggagaaaatggaaaacctggggaaccaggtccaaagggtgatgccggtgcacctggagctccaggaggcaagggtgatgctggtgcccctggtgaacgtggacctcctggattggcaggggccccaggacttagaggtggagctggtccccctggtcccgaangaggaaagggtgctgctggtcctcctgggccacctggtgctgctggtactcctggtctgcaaggaatgcctggagaaaga

SEQ ID NO: 1139 - DNA, 505 bp, Homo sapiens
ctgtggactccagcatgtttctgataattatgcaagcaacaattctgtagcctcaagtaagaccacctgtgaacttgatcattatctggcccaaatatgaagataaactataactttggagtttgtttcctatttgtattcacattctgcttcctaaatcagttttctaaattgtgcctgcaattaggcattggtcaggggtgaatggctcttttcacagagagtagccaaccagagacctttgctttgatatcatcaactgcagagaatgctgttgatgggaatgctggaagcagaaactttgtcatcggaaaaacttttcttgtatgcatgagactcaacatcaggatccacagcttaaagatgggaattcaggtatgaaagaaaacaggcaaggaggcactgagggagaaagacacagactttatcgctctgtggctcattgttactggaatattctaaaactcttgttcacatgctattatgacttataaagcagcaacag

SEQ ID NO: 1140 - DNA, 256 bp, Homo sapiens
ctgtagcttctgtgggacttccactgctcgggcgtcaggctcaggtagctgctggccgcgtacttgttgttgctctgtttggagggtttggtggtctccactcccgccttgacggggctgccatctgccttccaggccactgtcacagctcccgggtagaagtcactgatcagacacactagtgtggccttgttggcttggagctcctcagaggagggcgggaacagagtgacagtggggttggccttgggctgac

SEQ ID NO: 1141 - DNA, 371 bp, Homo sapiens
ccagggccccattctgtctgtgggactgtgggttctcagtggaattgttgcctttcttgtcgtggagaaatttgtgagacatgtgaaaggaggacatggtcacagtcatggacatggacacgctcacagtcatgcacgtggaagtcatggacatggaagacaagagcgttctaccaaggagaagcagagctcagaggaagaagaaaaggaaacaagaggggttcagaagaggcgaggagggagcacagtacccaaagatgggccagtgagacctcagaacgctgaagaagaaaaaagaggcttagacctgcgtgtgtcggggtacctgaatctggctgctgacttggcacacaacttcactgatggtctgg

SEQ ID NO: 1142 - DNA, 312 bp, Homo sapiens
  misc_feature 292: n = A,T,C or G
cctcccacactgtcaaatgtcaactccaccagcactgagacaatgagtagatgagaatgtagaaagagggaaggtggtaggtaaaggagcggaaggaagaggtggggaaagagggaaggtggtaggtaaaggagcggaaggaagaggtggggaaagagggaaggagagaagggaaggagggaagagaaagaaggaagaaaaggaaagcatggcccggctagagacaaagccagaggtgatcaggtcagcagcaggagaggctcagaagggagcctctcgggaagtgcaggcngccatgagggctcgtttcag

SEQ ID NO: 1143 - DNA, 367 bp, Homo sapiens
ccagacgtggtggctcacacctgcaatcccagcaccttaggaggccgaggcaggaggatccttgaggtcaggagttcgagaccagcctcgccaacatggtgaaaccccatttctactaaaatacaaaaaattagccaagtgtggtggcatatgcctgtaatcccaactactcagaaggccgaggcaggagaattacttgaacgcaggagaatcactgcagcccaggaggcagaggttgcagtgagccgagattgcaccactgcactccagcctgggtgactgagcaagactccatctcagtaaataaataaataaataaaaagcgctgcagtagctgtggcctcaccctgaagtcagcgggcccagg

SEQ ID NO: 1144 - DNA, 159 bp, Homo sapiens
cctggaggagcggccgcacacacagccaggcgctaggctccctgcgggacctcgggaagggggaagagcgtcaacgatttacggagggtccagccgctgggtcagattgagacaaaccattgtgtggttgggttcgggtcagcaggctggagagggttc

SEQ ID NO: 1145 - DNA, 450 bp, Homo sapiens
ccatgggtgtctggagcaccctgaaactgtatcaaagttgtacatatttccaaacatttttaaaatgaaaaggcactctcgtgttctcctcactctgtgcactttgctgttggtgtgacaaggcatttaaagatgtttctggcattttctttttatttgtaaggtggtggtaactatggttattggctagaaatcctgagttttcaactgtatatatctatagtttgtaaaaagaacaaaacaaccgagacaaacccttgatgctccttgctcggcgttgaggctgtggggaagatgccttttgggagaggctgtagctcagggcgtgcactgtgaggctggacctgttgactctgcagggggcatccatttagcttcaggttgtcttgtttctgtatatagtgacatagcattctgctgccatcttagctgtggacaaaggggggtcag

SEQ ID NO: 1146 - DNA, 324 bp, Homo sapiens
ccatacagggctgttgcccaggccctagaggtcattcctcgtaccctgatccagaactgtggggccagcaccatccgtctacttacctcccttcgggccaagcacacccaggagaactgtgagacctggggtgtaaatggtgagacgggtactttggtggacatgaaggaactgggcatatgggagccattggctgtgaagctgcagacttataagacagcagtggagacggcagttctgctactgcgaattgatgacatcgtttcaggccacaaaaagaaaggcgatgaccagagccggcaaggcggggctcctgatgctgga

SEQ ID NO: 1147 - DNA, 191 bp, Homo sapiens
ccacgaaaatcaatgagaagccacaggtgatcgcggactatgagagcggacgggccatacccaataaccaggtgcttggcaaaatcgagcgggccattggcctcaagctccggggaaaggacattggaaagcccatcgagaaggggcctagggcgaaatgaacacaaagcctcgaaatcagtgtgctccag

SEQ ID NO: 1148 - DNA, 344 bp, Homo sapiens
ctgtccaatgacaacaggaccctcactctactcagtgtcacaaggaatgatgtaggaccctatgagtgtggaatccagaacgaattaagtgttgaccacagcgacccagtcatcctgaatgtcctctatggcccagacgaccccaccatttccccctcatacacctattaccgtccaggggtgaacctcagcctctcctgccatgcagcctctaacccacctgcacagtattcttggctgattgatgggaacatccagcaacacacacaagagctctttatctccaacatcactgagaagaacagcggactctatacctgccaggccaataactcagccagtgg

SEQ ID NO: 1149 - DNA, 329 bp, Homo sapiens
ctgacccactcactgggcgggggcacaggctctggaatgggcactctccttatcagcaagatccgagaagaataccctgatcgcatcatgaataccttcagtgtggtgccttcacccaaagtgtctgacaccgtggtcgagccctacaatgccaccctctccgtccatcagttggtagagaatactgatgagacctattgcattgacaacgaggccctctatgatatctgcttccgcactctgaagctgaccacaccaacctacggggatctgaaccaccttgtctcagccaccatgagtggtgtcaccacctgcctccgtttccctgg

SEQ ID NO: 1150 - DNA, 406 bp, Homo sapiens
ccagttatttgcaagtggtaagagcctatttaccataaataatactaagaaccaactcaagtcaaaccttaatgccattgttattgtgaattaggattaagtagtaattttcagaattcacattaacttgattttaaaatcagttttgtgagtcatttaccacaagctaaatgtgtacactatgataaaaacaaccattgtattcctgtttttctaaacagtcctaatttctaacactgtatatatccttcgacatcaatgaactttgttttcttttactccagtaataaagtaggcacagatctgtccacaacaaacttgccctctcatgccttgcctctcaccatgctctgctccaggtcagcccccttttggcctgtttgttttgtcaaaaacctaatctgct

SEQ ID NO: 1151 - DNA, 346 bp, Homo sapiens
ctgcgtgagtaccaggagctgatgaacgtcaagctggccctggacatcgagatcgccacctacaggaagctgctggagggcgaggagagccggctggagtctgggatgcagaacatgagtattcatacgaagaccaccagcggctatgcaggtggtctgagctcggcctatgggggcctcacaagccccggcctcagctacagcctgggctccagctttggctctggcgcgggctccagctccttcagccgcaccagctcctccagggccgtggttgtgaagaagatcgagacacgtgatgggaagctggtgtctgagtcctctgacgtcctgcccaagtgaacag

SEQ ID NO: 1152 - DNA, 427 bp, Homo sapiens
ctggactgctgtacatcaaggacagattaactggaaaacatatgttccttatgcgtgatcgagagccattcagaaaagacttcctttgtgttcagcctatacttttccatatggtataccttgaaaaaaattagcacaccatggttatttttctaccttttataaaagacagagcctgtttactcatttagaagatagagaaaattggtctaaaattgaacatcctagattcacactcccaagtcacttaaggtgatttgatggtgaggaaaatgattgacagagcccaacaatgatctcaggaattacattttccaacagaccaaaaaatgttttcatgtagcagcaatgcagatttggtgaatatttaatatatattttagtatgtatttcactttatgactgacaattaaaaaatattgtttgg

SEQ ID NO: 1153 - DNA, 331 bp, Homo sapiens
ctggccggcggtgcagatctggagtccagcctcagggatgcgctactttccattctctgcattgaacattcgttctgtcagcatccgctccagcttcactgcatcagcggcaaacttgcggatcccgtcagagagcttctccacagccatctggtcctcgttgtgcaaccaacggaaagacttctcatccaggtggattttttccaggtcactggcttgggctgggggacaagaaccagccttccatgcctgctccatgtccctgcccaccttggccccttgggctcagggcctgaaccgctgcacccaagcatctcccaccagggccagg

SEQ ID NO: 1154 - DNA, 403 bp, Homo sapiens
ctgaactttcagatgaagttgacttctacttgattgcaggattcagggtttctcagatgttaatacagagtcaaaagcggtggataaaaccttgcaaatggcttgtgcttgttccaggctgttgcactgataaacccacaggctgtattcctcattgcttgcatctgtggtcttcagagccagtaagctttttcccgcccccagaccgtcatcgtaacacaccatccggattattaagtagagagcatgcctgtgcaaaacatcatattgatctgatgttgatacttttatgccatacttggaaactcccataataaattcttcctccggaggaacaaaaggcaactttccatcttgctgggcaacgtctatataatttatcaggtctaatggcccttcaagg

SEQ ID NO: 1155 - DNA, 491 bp, Homo sapiens
cctccctctcagagcttgccccagggactctctggccctcagggttcaatgtattctgaccaaggccaagctttcctggggctcagggaaaatcacactttgctacccgaagctgtatcccctcagatgccaggaaggccgtgatcatctgactccaccctcctgagacacattctctccctgactgtcctgttctaagtcagcggagcaccttaggatggaggggtggaggcgaggccagatgcagcctctgtgaacaggtgcctggaggctgggaaatgaccctgagagggcaggacacagcaaccgtgggcttaaggtgaccttgagagcaagcttggcccactttacaattctgttcagagccagcccctaacatggtggtcatttattcatttgttccctcattttaaaaaatgtaaggccaggcatggtggctcacgccgggtaatcccagcactttgggaggccgaggcaggcagatcacctga

SEQ ID NO: 1156 - DNA, 586 bp, Homo sapiens
agcaaatagaagcaatcagggcactgcaagttgtgactactccaagatgtgaatcatggatcatgcaaattacaatcatgttttaacctgacctccaaagggagaataaagtaaaaattatcccatgtgaggattattcaccagtttatatgtcattagttaccagtttttctttatgaataatgtttagcaatattataaagtatatctaatagttatcaggtttttggcttgttactttttggtagtaacttataaaactgactggaaaagaccaataaggcactgtttgcatgttacaaattatatccaaagaccaaaagctgttaataagaaatcttccaataaaaccacatcatattttcttttttatttacacccacatcaggattacaactttatcaggactgcaccttgatcaggaagggatgtttctcttacaaggctaataagaaaggaacaataaatttgctgatgaaaaaagtcatgcatttaaaaattttaactttaatttttaattgagggcaatattttaaagaaatgctcattagtcattcctttaaattgtgtgtgtgagagagagaaa

SEQ ID NO: 1157 - DNA, 392 bp, Homo sapiens
  misc_feature 373, 389: n = A,T,C or G
cctccggctggtgttctgagggttgccaggccatcgtggacacaggcacctctctgctcactgtgccccagcagtacatgagtgctcttctgcaggccacaggggcccaggaggatgagtatggacagtttctcgtgaactgtaacagcattcagaatctgcccagcttgaccttcatcatcaatggtgtggagttccctctgccaccttcctcctatatcctcagtaacaacggctactgcaccgtgggagtcgagcccacctacctgtcctcccagaacggccagcccctgtggatcctcggggatgtcttcctcaggtcctactattccgtctacgacttgggcaacaacagagtaggctttgccactgncgcctagacttgctgnctc

SEQ ID NO: 1158 - DNA, 375 bp, Homo sapiens
gggaaaaataattttattcctcaaatgatcagcacattcagaagcaggacagaggagctctgatgacatctctgggggactcaaagcggccctcattttctggtattttcccaggtgattctcttccaacctgtgagtcctgctctctttcctcccatctgaagtttgagacatcctctgccacaaggaaagccaccaataccagcccaaagagccaccagagaggaaccaaaccacatgcatcaagttataggaaggatgcaagaagggaaattaggaaggaaagggaggagtttagttggcattctggggcatgctaacatgagggcgatggtctctctccaagtcgctggacatatcccttttctttccagg

SEQ ID NO: 1159 - DNA, 361 bp, Homo sapiens
  misc_feature 338: n = A,T,C or G
gtttattgtaaaaaacaaaaaactctgtattgtgcacatgaagacctggagatgtgccgacttcctgtccccaaagccaatcttccccgccaaggcgactgaggatttcaagggctcagagttactgcaggaatccaggtgacaccaggaagagaagggggaggaggggaatcggaggggatgggtttaaaaggcagaggggagggagatggaagggaatgaggaggagggagactgagggggctgcctttccttggggactggggaactcatgccctgcccccacccgcagggctccaggggtgagagaaaggggtggagaataaagaattgggcancagggtgatggggggaacagcag

SEQ ID NO: 1160 - DNA, 142 bp, Homo sapiens
cgcaatgttgccagtgtctgtctgcaggttggctacccaactgttgcatcagtaccccattctatcatcaacgggtacaaacgagtcctggccttgtctgtggagacggattacaccttcccacttgctgaaaaggtcaagg

SEQ ID NO: 1161 - DNA, 193 bp, Homo sapiens
ccaaagcctacgaccacctcttcaagttgctgctgatcggggactcgggggtgggcaagacttgtctgatcattcgctttgcagaggacaacttcaacaacacttacatctccaccatcggaattgatttcaagatccgcactgtggatatagaggggaagaagatcaaactacaagtctgggacacggctgg

SEQ ID NO: 1162 - DNA, 265 bp, Homo sapiens
cctgggtgccacgattcccagcctggagcgcagccaggacgtgggagaccttctcagagactctccgggcacactctatgagctccttcttggtgtaggcatcactggggctgcactgcagggcgcctgccttggtgaccagagcggcacagccatggcccagctcctgtacccggtgtttgatatgggaacctatctcttcattttcagcagccaccgctgcaggcttggcctccgaggccagacggccatagtcactggtcag

SEQ ID NO: 1163 - DNA, 337 bp, Homo sapiens
  misc_feature 15, 204, 205, 212, 224, 263, 285, 293: n = A,T,C or G
ctgcagagtgggganaggcttttgccactagaaacttccaggatgcacgagatcaaggaattaagtctgtaacaaaataacaggatgctctgtgaagtccaaagaattgcttgaggcaaactgcagagctccatgagatcagcaaccccaagagcttttacaccgccggacacggtttaataggaaaaaaatctcctatactgnntattcanaaccaaatgaanagaaatgtcaaaggagtcggaaacaatatgtcaaattangtaaattcctgacctgacccanattttgcngaacatttgatcctaaactgtgctgtccacgtccttaggatcac

SEQ ID NO: 1164 - DNA, 368 bp, Homo sapiens
  misc_feature 221, 226, 233, 242: n = A,T,C or G
ccagacgtggtggctcacacctgcaatcccagcaccttaggaggccgaggcaggaggatccttgaggtcaggagttcgagaccagcctcgccaacatggtgaaaccccatttctactaaaaatacaaaaaattagccaagtgtggtggcatatgcctgtaatcccaactactcagaaggccgaggcaggagaattacttgaacgcaggagaatcactgcancccangaggcanaggttgcantgagccgagattgcaccactgcactccagcctgggtgacagagcaagactccatctcagtaaataaataaataaataaaaagcgctgcagtagctgtggcctcaccctgaagtcagcgggcccagg

SEQ ID NO: 1165 - DNA, 267 bp, Homo sapiens
  misc_feature 179, 211, 214, 235, 251, 252: n = A,T,C or G
ctgggaaggaggctcctccgccttctcctgtttgtcatcctcctcatcagactcgacctccatctcaacttcctcactctccccaaacttttcatagcgctcctgaatgaggattcgggcccccagctcctctggcgtggtggggggagggaagttcccttgctcattgggttggaagnccactgtttccaccaccacaaaatcatgccantcnatctgagcataggccacccgntccttctccttctccnnttcttccttcttcct

SEQ ID NO: 1166 - DNA, 433 bp, Homo sapiens
  misc_feature 142, 323, 354, 376, 381, 382, 402, 408, 422: n = A,T,C or G
ctgtctgtacactttttcttgggggaagagttcttgtcttcagtttactgcagtagggttcctggctctgttacatgctcatgtgttccggaagaacacatgaaatatcatcccacggatgacgatacagcccctgcttcancctcttctgatcaagatagtgtccaatgaaccccatactccttcccagcacaaagatgccattgagggctccaatgtcaatatattcatcagcttcctccctgcaacacacatcaacttgtagttttaaaaggctcacgtgactgccctcctccccacagacagtactactactgcccaanaatgagaagaaaaggggtgctctgggtggtngcattacaggcaatttttgttntcttnnttatacctctccttattttncaaatnttctattatgagtntgcattacttt

SEQ ID NO: 1167 - DNA, 362 bp, Homo sapiens
cctctggctctttcttcagccacttctccagctcctgcaggttctggtctgagtagtcagtgacgacgatctccttaaaggattcacaagcagagaggagctgatagatagtggggccagagccgatgtcaatcagcaggtctcccttcacaccgtctaggcagaatatcttgaaaagatttttcagaaggtgcttaagaatctggctttctgcagagtgcctagaaccaaacttgtaatatttttctaggtaatcccgagggttaaaatggcttagataggtgtccttggaggtgaagcctgattccattatgtctcacttccgtaccactggagcactgccctccttctctttcctccag

SEQ ID NO: 1168 - DNA, 459 bp, Homo sapiens
  misc_feature 370, 382, 406: n = A,T,C or G
gcagtcatggggcccaggaccatgccactggccctgctcccccagccgcagcctcacctgcaggtgctcctcgatgtccttgcggtcgtaggtgatgccactgggcgtgatgcacggctcccgcatcagctcaaagctgatcttgccacacaggtagtcggggatgtctcgcttctgtggcacaggggcacacggtcagaggctgaaaaggggcactgcacgagcacctgccagccatcggcagcaagcgacacacactcaccttcctcttctcatccacctgagaaaaaagctcgtccatgtccgccatgtacttgtcctgtgaagagttgagtgctgtgcttgggggagacaccccacctccctcctncatggggcacanacccaacacaaggcggggatgctnccacgccacgtgcacacacacagacccacatgtgggtggggggcaccctcacg

SEQ ID NO: 1169 - DNA, 386 bp, Homo sapiens
ccaggccacctgtgcggggctcctcgatgtggaaggttcgggtgaggagattgtagaaggagccgtagcacacggccaccacagtgcacgtgaggcagatcacgctgtagggcatgctgaagtccggtgtcggcaggttcaccagcagcggctccgtgtagagccgcacaaagtagttagagccatcagagactgggaacaggctgttgaagaggggactctcttcccagtccactggcttggctgctaccatgctgggcacaagggcgctgaggacagatgggctgacatagaagccatggttaggatctggcgtgtactcggtccacttcagcagcgcccgctcaaactggatggaaaccttggtgactgagttggccggccag

SEQ ID NO: 1170 - DNA, 480 bp, Homo sapiens
ctatttctctgttagtgtttaaccaaccatctgttctaaaagaagggctgaactgatggaaggaatgctgttagcctgagactcaggaagacaacttctgcagggtcactccctggcttctggaggaaagagaaggagggcagtgctccagtggtacagaagtgagacataatggaatcaggcttcacctccaaggacacctatctaagccattttaaccctcgggattacctagaaaaatattacaagtttggttctaggcactctgcagaaagccagattcttaagcaccttctgaaaaatcttttcaagatattctgcctagacggtgtgaagggagacctgctgattgacatcggctctggccccactatctatcagctcctctctgcttgtgaatcctttaaggagatcgtcgtcactgactactcaggaccagaacctgcaggagctggagaagtggctgaagaaagagccaga

SEQ ID NO: 1171 - DNA, 317 bp, Homo sapiens
cctcagcagccctgccacggatctgcccgattctttcgcatcaagaagttgatcttgcgagccatttccatgttgtagatccgccggcacctttcatagctttccctctgtcgccggcggcatggcttctcataataccgccgatgcttaatgtcctcaatgagcccatccatagtgaggattctgtttagggtcctgtatgcgctttccacgttcccttcctgtaccatcacagtcctggcgatgaacttcagatgttttgccatgaccttggatttaaaccttcactctgtagagcctcgcgcgctcagtaccta

SEQ ID NO: 1172 - DNA, 202 bp, Homo sapiens
  misc_feature 32, 62, 70, 71, 77, 90, 111: n = A,T,C or G
ggcaacgggaggaacagcagcagaggcagcangagcaggaggagcgtgaacgagaagagcancggcgatnngctgcnctcagtgaccganagaagagagctctggctgcanagcgccgactcgctgcccagttgggagcccctacctctccaatccctgactctgcaatcgtcaatactcgacgctgctggagttgtggggc

SEQ ID NO: 1173 - DNA, 173 bp, Homo sapiens
ctgcctgggttgtggccgccctagcatcctgtatgcccacagctactggaatccccgctgctgctccaggccaagcttctggttgattaatgagggcatggggtggtccctcaagaccttcccctaccttttgtggaaccagtgatgcctcaaagacagtgtcccctccacag

SEQ ID NO: 1174 - DNA, 301 bp, Homo sapiens
ccaagagctacaatgggcagcgcatcagacagaacgtgcaggtttttgagttccagttgactgcggaggacatgaaagccatagatggcctagacagaaatctccactattttaacagtgatagttttgctagccaccctaattatccatattcagatgaatattaacatggagagctttgcctgatgtctaccagaagccctgtgtgtggatggtgacgcagaggacgtctctatgccggtgactggacatatcacctctacttaaatccgtcctgtttagcgacttcagtcaactacag

SEQ ID NO: 1175 - DNA, 537 bp, Homo sapiens
cctgcagggctcggccgtaggagaaggtcagggcccagggcttcagcagggggcacttgttaatggcattgaggttgatggacgcctcctcctcactctggcctccagacaggaaggtgatcccagtgacagcggggggcactgtgcggcgcagcgctgtgacggtcgccatggcaatctcctcatgagaaaacttctgagtgcaagcatggcctggggtgaccatgttgggcttcagcaaggtgccttccaggtagatgtggtggtcactcagagccttgtagacagcagccagcaccttctcggtcacatactggcagcgcttcaagtcatggtccccatcagggaggatctcaggctccacgatgggcacaatgccattctgctggcagatactggcataacgggccagaacattggcattttccatgatggcgagggctgagggggtgtgttccccaatcttcagcacacaacgccacttggcgaagtcagctccgtccttcttgtactgggcacagcgctcagacagcccat

SEQ ID NO: 1176 - DNA, 384 bp, Homo sapiens
  misc_feature 268, 285, 334, 360, 361, 368: n = A,T,C or G
ctgacaaaaaatgtgaaatttccacaaaatatccaacttatgtgactaaacgcagtagtttttttaaaaggggagatagaaaataaatggttttgttggagtgcattttagtaagcctttgcagtaaaatgacggttgtaactactaaaccaaatttagttttcacagcatggttttgttgttttccccttgtttttcagaggtaaattttgcattatatccttcagtattttaacactattttggcagtttacacattactttttgnttttccttcctttttgngaaatgtattaagttgtggttcttattgaaacagtattatataatgttngcttaattatatcatgtgatgctcanntctattntgatttattcattagt

SEQ ID NO: 1177 - DNA, 562 bp, Homo sapiens
  misc_feature 492, 541, 550: n = A,T,C or G
ccaacaacatgcaggaagctcagagtatcgatgaaatctacaaatacgacaagaaacagcagcaagaaatcctggcggcgaagccctgggctaaggatcaccattactttaagtactgcaaaatctcagcattggctctgctgaagatggtgatgcatgccagatcgggaggcaacttggaagtgatgggtctgatgctaggaaaggtggatggtgaaaccatgatcattatggacagttttgctttgcctgtggagggcactgaaacccgagtaaatgctcaggctgctgcatatgaatacatggctgcatacatagaaaatgcaaaacaggttggccgccttgaaaatgcaatcgggtggtatcatagccaccctggctatggctgctggctttctgggattgatgttagtactcagatgctcaatcagcagttccaggaaccatttgtagcagtggtgattgatccaacaagaacaatatccgcagggnaaagtgaatcttggcgcctttaggacatacccaaagggctacaaacctnctgatgaangaccttctgagt

SEQ ID NO: 1178 - DNA, 353 bp, Homo sapiens
  misc_feature 117: n = A,T,C or G
cgcgtctggatggccgaatcattcgcacagactgggacgcaggctttaaggagggcaggcaatacggccgtgggcgatctgggggccaggttcgggatgagtatcggcaggactacnatgctgggagaggaggctatggaaaactggcacagaaccagtgagtggtgagagctctgtcagtgacaaacactcctttggcctgttgaatttgctgaagaacatcacctaaagtctgcacacgagcccatttttaccaagatttgatcagtgtctttactgagctggaagcctctgaaagttattaaaggacagaatccaaaagaatgcctttaattcttgtctgagaatcttgg

SEQ ID NO: 1179 - DNA, 288 bp, Homo sapiens
ccaatgggatcctcaaggtgcctgccatcaatgtcaatgactccgtcaccaagagcaagtttgacaacctctatggctgccgggagtccctcatagatggcatcaagcgggccacagatgtgatgattgccggcaaggtagcggtggtagcaggctatggtgatgtgggcaagggctgtgcccaggccctgcggggtttcggagcccgcgtcatcatcaccgaggttgaccccatcaacgcactgcaggctgccatggagggctatgaggtgaccaccatggatgagg

SEQ ID NO: 1180 - DNA, 523 bp, Homo sapiens
ctggagagatggagcggtgggcaccgtcatccttcctcatcagccacatagaaggacagtggcgatttcagcccagcttttctgactgcttgtaaattgaagcccagaactggtttgccacctgtgggatcgactcagcattttaaaataggaggcagtcgtgagtgcaggtttcttgcagctccgggtggccctgggctccaggtcaggagacctcagctcctgtccctgatctgtggttgtcaagccttgcagactctaaactcagcatctttatctgtcagacgtagacacgtggctcccgtggttggtgcggttggaatagctgaggtaatacacggacctccaagcactagagcagtatgaggagttctgaggaatggttatcctgcggtgcctgtggtccacagcaagccattcttatcccatccggtttacttcccacagccactttgtaagcataggcattatcctctaccccatcatagaaatgaggaaaagaatcaccaagagagtaagcagc

SEQ ID NO: 1181 - DNA, 493 bp, Homo sapiens
  misc_feature 438, 479: n = A,T,C or G
cacagatgaaggctttgtgatacctgatgaagggggcccacaggaggagcaagaagagtattaacagcctggaccagcagagtaacatcggaattcttcactccaaatcatgtgcttaactgtaaaatactcccttttgttatccttagaggactcactggtttcttttcataagcaaaaagtacctcttcttaaagtgcactttgcggacgtttcactccttttccaataagtttgagttaggagcttttaccttgtagcagagcagtattaacacctagttggttcacctggaaaacagagaggctgaccgtggggctcaccatgcggatgcgggtcacactgaatgctggagagatgttatgtaatatgctgaggtggcgacctcagtggagaaatgtaaagactgaattgaattttaagctaatgtgaaatcanagaatgttgtaataagtaaatgccttaagagtatttaaaanatgcttccacattt

SEQ ID NO: 1182 - DNA, 329 bp, Homo sapiens
cgcgtctctgacactgtgatcatgataggggttcaaacagaaagtgcctgggccctccttctaagtcttgttaccaaaaaaaggaaaaagaaaagatcttctcagttacaaattctgggaagggagactatacctggctcttgccctaagtgagaggtcttccctcccgcaccaaaaaatagaaaggctttctatttcactggcccaggtagggggaaggagagtaactttgagtctgtgggcctcatttcccaggtgccttcaatgctcatcaaaaccaggcatggggaaggccctggcaaactgctccacccgttgcctgaggttgg

SEQ ID NO: 1183 - DNA, 198 bp, Homo sapiens
cctgacagacagaagggcttggagattttttttctttacaattcagtcttcagcaacttgagagctttcttcatgttgtcaagcaacagagctgtatctgcaggttcgtaagcatagagacgatttgaatatcttccagtgatatcggctctaactgtcagagatgggtcaacaaacataatcctggggacatactgg

SEQ ID NO: 1184 - DNA, 224 bp, Homo sapiens
ctggaggtgcctcagaaggtgcattctgcttcctgcaggggcttgaaacaccaaggcactccagggatcctggagtcaaagcagcagccccggttgttgcactccttgggggtgacatgggggtagccgcagtccaccctgtccttggctggcacggcacactggtttgcagacaggcccacgtactcctcagcagagctggaggacagcaaggccaggaccag

SEQ ID NO: 1185 - DNA, 367 bp, Homo sapiens
ccttttacagatgtcagctttcactggcctccatgcacaacctcccactaccacccaatctgcctgccacagcaaagtgcaggcaccctgggccccctggaggatgcgggcaggggctacagggcatccaggatgtggtcgatcttggtgaccagctcctggcgctttcctgagatgagcttctcattctcaatgtacgtgtctttcttgagcttgccagccaccaggcgctcagcctccaccgccgacttcagcaccagctccttgacctgtgcatccagcttctgcatttcgctcactctgtcgcacagatcagagccctctgtcttcagcctggactgcagcagtgcaatctcactggtcaagg

SEQ ID NO: 1186 - DNA, 188 bp, Homo sapiens
ccattaagcggatgctggagatgggagctatcaagaacctcacgtccttccgacctgggcaagagctgtagcctgtcggttgcctactctgctgtctgggtgacccccatgcgtggctgtgggggtggctggtgccagtatgacccacttggactcaccccctcttggggagggagtcctgggcctgg

SEQ ID NO: 1187 - DNA, 379 bp, Homo sapiens
gttgatgctactctgaagtctctcaacaaccagattgagacccttcttactcctgaaggctctagaaagagcccagctcgcacatgccgtgacttgagactcagccacccagagtggagcagtggttactactggattgaccctaaccaaggatgcactatggatgctatcaaagtatactgtgatttctctactggcgaaacctgtatccgggcccaacctgaaaacatcccagccaagaactggtataggagctccaaggacaagaaacacgtctggctaggagaaactatcaatgctggcagccagtttgaatataatgtagaaggagtgacttccaaggaaatggctacccaacttgccttcatgcgcctgctgg

SEQ ID NO: 1188 - DNA, 384 bp, Homo sapiens
cgcgtcggactgcagccagtccgtttcctttctttagccagccatcctggtactgtagtttaggggttgatggtggttgaaattgatttctggctggttactaaggtgcctgctagccattgtataaaattaaaacatgaagaatattttttttttgagcatggctagtggatttaaaacaacacatacctgtcactgctggagtcaaacttataaaaagccttaagtggaaagtgttccagacggagactctgagttaatagaggagtagaagctggtgttaaagttcccacgacgcacatggctttgccagaaactctgtttaatgatcggcctttcacctcttcacttatccttagtcccagtagccaggatacctgatgg

SEQ ID NO: 1189 - DNA, 419 bp, Homo sapiens
  misc_feature 348, 349: n = A,T,C or G
ggaaaaaccagccactgctttacaggacagggggttgaagctgagccccgcctcacacccacccccatgcactcaaagattggattttacagctacttgcaattcaaaattcagaagaataaaaaatgggaacatacagaactctaaaagatagacatcagaaattgttgagttaagctttttcaaaaaatcagcaattccccagcgtagtcaagggtggacactgcacgctctggcatgatgggatggcgaccgggcaagctttcttcctcgagatgctctgctgcttgagagctattgctttgttaagatataaaaaggggtttctttttgtctttctgtaaggtnnacttccagcttttgattgaaagtcctagggtgattctatttctgctgtgatttatctgctgaaagctcag

SEQ ID NO: 1190 - DNA, 173 bp, Homo sapiens
ccaggtactggcacatcatgctctggatgggggtggtggtgtcctgtaggcagagaaacaggaaattgtcgtagtcagtatcgagcagcgtggcctcgttcgccaccgtatagttgatcttgaacttctttggattctcagtcttctctccaaggaccttcttctcaacacag

SEQ ID NO: 1191 - DNA, 341 bp, Homo sapiens
cctcctgccagcagttcttgaagcttctttttcattcctgctactctacctgtatttctcagttgcagcactgagtggtcaaaatacatttctgggccacctcagggaacccatgcatctgcctggcatttaggcagcagagcccctgaccgtcccccacagggctctgcctcacgtcctcatctcatttggctgtgtaaagaaatgggaaaagggaaaaggagagagcaattgaggcagttgaccatattcagttttatttatttatttttaatttgttcttttctccaagtccaccagtctctgaaattagaacagtaggcggtatgagataatcagga

SEQ ID NO: 1192 - DNA, 324 bp, Homo sapiens
ttggaggttggcggcgcggggctgaaggctagcaaaccgagcgatcatgtcgcacaaacaaatttactattcggacaaatacgacgacgaggagtttgagtatcgacatgtcatgctgcccaaggacatagccaagctggtccctaaaacccatctgatgtctgaatctgaatggaggaatcttggcgttcagcagagtcagggatgggtccattatatgatccatgaaccagaacctcacatcttgctgttccggcgcccactacccaagaaaccaaagaaatgaagctggcaagctacttttcagcctcaagctttacacag

SEQ ID NO: 1193 - DNA, 521 bp, Homo sapiens
ctgctttgttttctgttggcagtggagggacaaggtgagaggagccaggggtagtcatgaacaccagtgggttctgccctgggcagctccccaccttctttaagagagtactgtgtctcagctccagcagtctcaactgggaagacccaggactcctgctcttttctctaatccctgggagacgaggtccagctaaggtagagtaagcagtcagtgaccaggcaggctggtttgggaggtcactgcctggaggacgggatcttgtattcttcggaagatggctgggaaattcttccctccattacgtagaactttcttcccctcctcagttgaggtgcctagatgtcccacaacggggtcttcactcaggtcctccagaggcacacgctcaaacagtgggtgctcttcgaaatgagtgcacatccagtcgtgtagctccagcacatcggttatggtatacaccagcccctgcataggcaaaatcaccctagacaggaggctgcatgcaacgtcagcagcca

SEQ ID NO: 1194 - DNA, 208 bp, Homo sapiens
ccagtgactagaaggcgaggcgccgcgggaccatggcggcggcggcggacgagcggagtccagaggacggagaagacgagggagaggaggagcagttggttctggtggaattatcaggaattattgattcagacttcctctcaaaatgtgaaaataaatgcaaggttttgggcattgacactgagaggcccattctgcaagtggacag

SEQ ID NO: 1195 - DNA, 499 bp, Homo sapiens
ccagaaaggaaagacaataattttgttttttcattttgaaaaaattaaatgctctctcctaaagattcttcacctactttggtctccataacttctatgttttctttccttctgacacactagtgcccctaaattgtgatttgcctatacgtttagggccggggttggaagatgttaacaaccatttaagattcatttctgcagtgggagtgggtggagtttcaccctctgggaaaggggcaggtgacaggtatttatcagtcagtgcctctctagctcttgtaggaagaagcacacgcaggatggagtctagaggatgagcgatattgactagcaattcatgggctccctccagcagtgcgagggtcagagtttctggagccttgggaggaggcatccctgtgagggggggttagggagatgggagggcaccaggaaaagtgattagaagtcaggtatgggaaggctaaattaggacagagtcgagtacatctctgct

SEQ ID NO: 1196 - DNA, 455 bp, Homo sapiens
ctgacccccctttgtccacagctaagatggcagcagaatgctatgtcactatatacagaaacaagacaacctgaagctaaatggatgccccctgcagagtcaacaggtccagcctcacagtgcacgccctgagctacagcctctcccaaaaggcatcttccccacagcctcaacgccgagcaaggagcatcaagggtttgtctcggttgttttgttctttttacaaactatagatatatacagttgaaaactcaggatttctagccaataaccatagttaccaccaccttacaaataaaaagaaaatgccagaaacatctttaaatgccttgtcacaccaacagcaaagtgcacagagtgaggagaacacgagagtgccttttcattttaaaaatgtttggaaatatgtacaacttcgatacagtttcagggtgctccagacacccatggacctg

SEQ ID NO: 1197 - DNA, 444 bp, Homo sapiens
cctggatgtggctcttcgcactgaaggccaagtagtagatcacaaggccgatcgccgcagccagcacctcagtggacacccagggcccgttccaagtgccccgatggtccacgctgactgtaaacagaggcgggatgatggaaatgtcctcgttattcctctgagccttcctgaggaggctgtaggactcctcgtcgaagaatctaacctcataggtgcctgcgtgggcgctcttgtggttcaggcttcaggacacctgataacgccccacatcctggcctcgagtgacagggaattgttttccaccgacgtcagcatagagagccatgttctggaccctgttcttgcatgtcagggagatctccacaatgaagacggtctcagtggaaatgacagcgtcagaagtggtgtagtaggaaggggtgatctggggctccaggcagg

SEQ ID NO: 1198 - DNA, 450 bp, Homo sapiens
ccatgggtgtctggagcaccctgaaactgtatcaaagttgtacatatttccaaacatttttaaaatgaaaaggcactctcgtgttctcctcactctgtgcactttgctgttggtgtgacaaggcatttaaagatgtttctggcattttctttttatttgtaaggtggtggtaactatggttattggctagaaatcctgagttttcaactgtatatatctatagtttgtaaaaagaacaaaacaaccgagacaaacccttgatgctccttgctcggcgttgaggctgtggggaagatgccttttgggagaggctgtagctcagggcgtgcactgtgaggctggacctgttgactccgcagggggcatccatttagcttcaggttgtcttgtttctgtatatagtgacatagcattctgctgccatcttagctgtggacaaaggggggtcag

SEQ ID NO: 1199 - DNA, 294 bp, Homo sapiens
agtcacagttgcacctattcaaaactagctttaaagtgagctatttttaaacttcataaaaatattcatgattttattagtttgaatatttctacaagattcgggtgggcttttcctttaggtgaaaacagctatccactcctgtggccttataactcaggaaatgctggggatgcaaacgtgcaaaaggcagggggaagctgcccaggctgagactggagcagctaggagtgtgcttggggaacgggagctgagatcccggagcagaaatggtcagccgtgctctggagcagg

SEQ ID NO: 1200 - DNA, 258 bp, Homo sapiens
agctacctaagaacagctaaaagagcacacccgtctatgtagcaaaatagtgggaagatttataggtagaggcgacaaacctaccgagcctggtgatagctggttgtccaagatagaatcttagttcaactttaaatttgcccacagaaccctctaaatccccttgtaaatttaactgttagtccaaagaggaacagctctttggacactaggaaaaaaccttgtagagagagtaaaaaatttaacacccatagtagg

SEQ ID NO: 1201 - DNA, 403 bp, Homo sapiens
ctgagctgctgtctgctttggaaaaccgttcctgccgctgccgatggatggaaatgcaatggatttcagcttcttatcatcagccagggccaagcagtttttcactgtcttttccagaagttcttcacacttgtctgcaccccaaactggactattacagtggatcacaaacttggcaggcaggccatggcctgcgctgacagcagctccagctacttccaagggcccgttctttttccggagttccaggacagcttccacaaactccttgccacctttcttctccagcgtgtttcctaggtcatctttaaggtcaatgtcagcattggtaggattgattatggcctccacctcaaagccggctaaattactgatttcactgtgaataaggttcggcttctgg

SEQ ID NO: 1202 - DNA, 325 bp, Homo sapiens
ctgaacctgcgggagtcggccaccatcacgtgcctggtgacgggcttctctcccgcggacgtcttcgtgcagtggatgcagagggggcagcccttgtccccggagaagtatgtgaccagcgccccaatgcctgagccccaggccccaggccggtacttcgcccacagcatcctgaccgtgtccgaagaggaatggaacacgggggagacctacacctgcgtggtggcccttgaggccctgcccaacagggtcaccgagaggaccgtggacaagtccaccggtaaacccaccctgtacaacgtgtccctggtcatgtccgacacag

SEQ ID NO: 1203 - DNA, 518 bp, Homo sapiens
ctcaaccacagtctgacaccagagcccacttccatcctctctggtgtgaggcacagcgagggcagcatctggaggagctctgcagcctccacacctaccacgacctcccagggctgggctcaggaaaaaccagccactgctttacaggacagggggttgaagctgagccccgcctcacacccacccccatgcactcaaagattggattttacagctacttgcaattcaaaattcagaagaataaaaaatgggaacatacagaactctaaaagatagacatcagaaattgttaagttaagctttttcaaaaaaccagcaattccccagcgtagtcaagggtggacactgcacgctctggcatgatgggatggcgaccgggcaagctttcttcctcgagatgctctgctgcttgagagctattgctttgttaagatataaaaaggggtttctttttgtctttctgtaaggtggacttccagcttttgattgaaagtcctagggtgattctatttctgctg

SEQ ID NO: 1204 - DNA, 352 bp, Homo sapiens
ggggaaaggaggtctcactgagcaccgtcccagcatccggacaccacagcggcccttcgctccacgcagaaaaccacacttctcaaaccttcactcaacacttccttccccaaagccagaagatgcacaaggaggaacatgaggtggctgtgctgggggcaccccccagcaccatccttccaaggtccaccgtgatcaacatccacagcgagacctccgtgcccgaccatgtcgtctggtccctgttcaacaccctcttcttgaactggtgctgtctgggcttcatagcattcgcctactccgtgaagtctagggacaggaagatggttggcgacgtgaccggggcccagga

SEQ ID NO: 1205 - DNA, 250 bp, Homo sapiens; identical to SEQ ID NO: 1137

SEQ ID NO: 1206 - DNA, 275 bp, Homo sapiens
  misc_feature 10, 11, 13, 236, 237: n = A,T,C or G
ctgctctcgnngnctcactggatggaccagcacttccgcacgacgcccctggagaagaacgcccccgtcttgctggccctgctgggtatctggtacatcaactgctttgggtgtgagacacacgccatgctgccctatgaccagtacctgcaccgctttgctgcgtacttccagcagggcgacatggagtccaatgggaaatacatcaccaaatctggaacccgtgtggaccaccnnacaggccccattgtgtggggggagccagggaccaatgg

SEQ ID NO: 1207 - DNA, 182 bp, Homo sapiens
ccatctcctgctcgaagtccagggcgacgtagcacagcttctccttgatgtcgcgcacgatttcccgctcggccgtggtggtgaagctgtagcctcgctcagtgaggatcttcatgaggtagtcggtcaggtcccggccagccaggtccagacgcaggatggcgtgggggagggcgtagccc

SEQ ID NO: 1208 - DNA, 260 bp, Homo sapiens
  misc_feature 130, 154, 167, 176, 240: n = A,T,C or G
gctggttatgaactcctgacctcaagtgatctgccctcctcagcctcccaaagtgctgggattataggcatgagccactggaatttttctttttttttttctttctttttttttttttttttaaattganacaaggtctggctctatcgcccangctggagtgcagnggcaccatntcggctcactgcaacctctgcctgctgggctcgagccatcctcccacctcagcctcccaagtanttgggactagaggtatgcac

SEQ ID NO: 1209 - DNA, 487 bp, Homo sapiens
aaacccactccaccttactaccagacaaccttagccaaaccatttacccaaataaagtataggcgatagaaattgaaacctggcgcaatagatatagtaccgcaagggaaagatgaaaaactataaccaagcataatatagcaaggactaatccctataccttctgcataatgaattaactagaaataactttgcaaggagagccaaagctaagacccccgaaaccagacgagctacctaagaacagctaaaagagcacacccgtctatgtagcaaaatagtgggaagatttataggtagaggcgacaaacctaccgagcctggtgatagctggttgtccaagatagaatcttagttcaactttaaatttgcccacagaaccctctaaatccccttgtaaatttaactgttagtccaaagaggaacagctctttggacactaggaaaaaaccttgtagagagagtaaaaaatttaacacccatagta

SEQ ID NO: 1210 - DNA, 216 bp, Homo sapiens
ccactcagctcagcgggcgacgtgcccctacaagttggcagaagtggctgccactgctgggtttgtgtaagagaggctgctgccaccattacctgcagaaaccttctcataggggctacgatcggtactgctagggggcacatagcgcccatggatgtggtaggtggggtactcgctcataggatggtaggtatcccgggctggaaagatgtccag

SEQ ID NO: 1211 - DNA, 443 bp, Homo sapiens
ccaaggtcagaggctgatgcaacaggccctcttctccccagggccaggctcctgtccagcctgggcactgcccagagtgatggcattggtccggatgctgttctgtctctgcttggacaccttcgcaaagatttctttcaggacagtctcaaaggctagctcaacattggtagagtccagggctgaggtctccaggaagagcagtccattgttttcagcgaacattcgggcctcctcagtgggcacttcccgggcctggctgaggtcacttttgttacccacgagcatgacgacgatcgtggcttcagcatggtcatagagctccttcagccatcgctccaccacagcataggtctggtgcttggttaggtcaaacaccaggagggcccccactgcaccacgatagtacgccgaggtgatggctcggtaccgctccaggccag

SEQ ID NO: 1212 - DNA, 526 bp, Homo sapiens
actgaaacccgagtaaatgctcaggctgctgcatatgaatacatggctgcatacatagaaaatgcgaaacaggttggccgccttgaaaatgcaatcgggtggtatcatagccaccctggctatggctgctggctttctgggattgatgttagtactcagatgctcaatcagcagttccaggaaccatttgtagcagtggtgattgatccaacaagaacaatatccgcagggaaagtgaatcttggcgcctttaggacatacccaaagggctacaaacctcctgatgaaggaccttctgagtaccagactattccacttaataaaatagaagattttggtgtacactgcaaacaatattatgccttagaagtctcatatttcaaatcctctttggatcgcaaattgcttgagctgttgtggaataaatactgggtgaatacgttgagttcttctagcttgcttactaatgcagactataccactggtcaggtctttgatttgtctgaaaagttagagcagtcagaag

SEQ ID NO: 1213 - DNA, 359 bp, Homo sapiens
  misc_feature 15, 255, 258, 321, 322, 357: n = A,T,C or G
ccagccattgcctgncatttggtagtatagtatgattctcaccattatttgtcatggaggcagacatacaccagaaatgggggagaaacagtacatatctttctgtctttagtttattgtgtgctggtctaagcaagctgagatcatttgcaatggaaaacacgtaacttgtttaaaagtttttctggtagctttagctttatgctaaaaaaaataatgacattgggtatctatttctttctaagactacattantangaaaataagtcttttcatgcttatgatttagctgttttgtggtaattgctttttaaaggaagnnattaatatcataagttattattaatattgtgaacnca

SEQ ID NO: 1214 - DNA, 428 bp, Homo sapiens
ccaagcttgaggcagccctaggtgaggccaagaagcaacttcaggatgagatgctgcggcgggtggatgctgagaacaggctgcagaccatgaaggaggaactggacttccagaagaacatctacagtgaggagctgcgtgagaccaagcgccgtcatgagacccgactggtggagattgacaatgggaagcagcgtgagtttgagagccggctggcggatgcgctgcaggaactgcgggcccagcatgaggaccaggtggagcagtataagaaggagctggagaagacttattctgccaagctggacaatgccaggcagtctgctgagaggaacagcaacctggtgggggctgcccacgaggagctgcagcagtcgcgcatccgcatcgacagcctctctgcccagctcagccagctccagaagcag

SEQ ID NO: 1215 - DNA, 414 bp, Homo sapiens; identical to SEQ ID NO: 1005

SEQ ID NO: 1216 - DNA, 162 bp, Homo sapiens
  misc_feature 118, 119, 148: n = A,T,C or G
cctggccgcagggtcccccggtattgctgttgctacgaggttggggggcagcgattgtcctgtgggagccaccgttctcctgggtcggggaccctcacttcttctggggtgtgctcannttctgcatgccccggatcttgtccagcangccagaaatgaagg

SEQ ID NO: 1217 - DNA, 392 bp, Homo sapiens
  misc_feature 306: n = A,T,C or G
ctgaagtagaggctggaactgaagctgagactgaggctgaggctgaaactggagctaagggtgaggctggaactggagctgaggttgaggccagaactggagctaaagttgaggctggaaccggagctgaggttgaggctggaactggagttaaggttgctggaagtggagctgaggttgaggctggaactgaagctgaggttgaaggtggaagtggagccgaagctagaggtggaactgaggctgaagactgtgcttgctggatccctgtagcctgttttttggcaaatcttggaggaagcttanaagtctggcttcttcctttttcatttgcattctttttgttccagaccttaaaaaattaacggggaccatttttgtcaataatgcag

SEQ ID NO: 1218 - DNA, 526 bp, Homo sapiens
  misc_feature 379, 447, 470, 501: n = A,T,C or G
ctgagctttcagcagataaatcacagcagaaatagaatcaccctaggactttcaatcaaaagctggaagtccaccttacagaaagacaaaaagaaacccctttttatatcttaacaaagcaatagctctcaagcagcagagcatctcgaggaagaaagcttgcccggtcgccatcccatcatgccagagcgtgcagtgtccacccttgactacgctggggaattgctgattttttgaaaaagcttaacttaacaatttctgatgtctatcctttagagttctgtatgttcccattttttattcttctgaattttgaattgcaagtagctgtaaaatccaatctttgagtgcatgggggtgggtgtgaggcggggctcancttcaaccccctgtcctgtaaagcagtggctggtttttcctgagcccagccctgggaggtcgtggtangtgtggaggctgcagagctcctncagatgctgccctcgctgtgcctcacaccanagaggatggaagtgggctctggtgt

SEQ ID NO: 1219 - DNA, 382 bp, Homo sapiens
ctggccggcggtgcagatctggagtccagcctcagggatgcgctactttccattctctgcattgaacattcgttctgtcagcatccgctccagcttcactgcatcagcggcaaacttgcggatcccgtcagagagcttctccacagccatctggtcctcgttgtgcaaccaacggaaagacttctcatccaggtggattttttccaggtcactggcttgggccgccttggctgagagcacaggcaccagcttggcgttgtcctgcagcagctctcccaggagcttgggtgagatggtgaggaagtcacagccggccagtgctttgatctcgcccgtgttgcggaaggaggcgcccatgacaatggttttgtagctaaacttc

SEQ ID NO: 1220 - DNA, 127 bp, Homo sapiens
tcgacctccttgaagcagaccaagtatagcaagcctctaaaaggactactgagaaacagaatcagaaactctagaactctagttagggcccttcagcagggctgcagagcctccctggatacccagg

SEQ ID NO: 1221 - DNA, 304 bp, Homo sapiens
ccaccccggagatgacacgaggctcacatgactctagacacttggtggaaagtgaggcgagaaaaacaatgacttgggccaattacacgactgcaaagctagagctgccaacagggctccagggagcttggcttctgtagaagttctaaggaagcggtacgaactccacggcggtggggcgctaactagcagggacccctgcaagtgttggtcgggggcctcgggctgcctgagctgacacgaggggaggggtctgtgtagccaacaggtgaccgaagggcttgcctgcccacagcttacttgg

SEQ ID NO: 1222 - DNA, 309 bp, Homo sapiens
ctgtcgcactcgtagctgcaactcactcaacttgtctttagcagcaatttctgcatagtcattggcatgttcacctacctggatgtccgggtgaactctcagcatgcctccagcaaagagggagaacttggtggaattggagtgaagacagatctggtgctcaccaggggtatgggaagtgaaagtgaacctgccctcggagccatactgccgggccaggatgaccttgtcctctgggtcctccacctccacaaacatgccaagccccggggtggccggctggtactcctcccgctgcttgtcatacag

SEQ ID NO: 1223 - DNA, 390 bp, Homo sapiens
cctggcctgggagccctgtgcctactagaagcacattagattatccattcactgacagaacaggtcttttttgggtccttcttctccaccacgatatacttgcagtcctccttcttgaagattctttggcagttgtctttgtcataacccacaggtgtagaaacaagggtgcaacatgaaatctctgtttcgtagcaagtgcatgtctcacagttgtcagtctgccactccgagtttattggtgtttgtttcctttgagatccatgcatttcctggttgaatctcctggaactccctcattaggtatgaaatagcatgatgcattgcataaagtcacgaaggtggcaaagatcacaacgctgcccaggagaacattcattgtgataagca

SEQ ID NO: 1224 - DNA, 407 bp, Homo sapiens
ccttatgactacaacggcccacgagaaaaatatggaatcgttgattacatgatcgagcagtccgggcctccctccaaggagattctgaccctgaagcaggtccaggagttcctgaaggatggagacgatgtcatcatcatcggggtctttaagggggagagtgacccagcctaccagcaataccaggatgccgctaacaacctgagagaagattacaaatttcaccacactttcagcacagaaatagcaaagttcttgaaagtctcccaggggcagttggttgtaatgcagcctgagaaattccagtccaagtatgagccccggagccacatgatggacgtccagggctccacccaggactcggccatcaaggacttcgtgctgaagtacgccctgcccctggttgg

SEQ ID NO: 1225 - DNA, 250 bp, Homo sapiens
ctgcagctttgggcatttttctttttaattattcttcctctgactttgtatcccttaatacctacactctccaattgtaagagaaagggggcagggaagcaatatagcttccattctaaggctgtattcccgttatgaattactagctgattacagttcagagcattgatcctggaatgtgtgctggagaaatttaaaatactggggttttttgtttaatggtgcctgtttagagttggaagttgaacag

SEQ ID NO: 1226 - DNA, 444 bp, Homo sapiens
  misc_feature 427: n = A,T,C or G
cctttaggctgttgctctgggcagggggtgggggtgcgggggcttacagtgggggcccttagttggcacaggttcggaagggccccaggcagacatgaattctcctgagacttgaggtaggttgcttcagccagcccgggcggagaagaagggcagagagcgaacataggagtccagtcgggagcgaaagagctcactttgcacagtttggcccagcgggcacaggggattcttcaccaccagctccacatacagcgcactgtagatgtggtgcagcacatctcggatgggtcccacgcccaagtcagtattcatgacaactttgatcccagtgggcgtctcgtagtaatggagtttgtaacggctagtttggaaggccaggaagccatccttcatgtctagcggggacatcttgctgacaaacgancggatagagaagagcat

SEQ ID NO: 1227 - DNA, 491 bp, Homo sapiens
gttagccttacatgttgtgtagacttactttaagtttgcacccttgaaatgtgtcatatcaatttctggattcataatagcaagattagcaaaggataaatgccgaaggtcacttcattctggacacagttggatcaatactgattaagtagaaaatccaagctttgcttgagaacttttgtaacgtggagagtaaaaagtatcggttttattctttgctgatgtcctttctgcttgaaataacagtcaccatacagctaaaggagaggagtttctttccttctaagtaggcagaaatggtatcattatgttgccgctctccaatctcccagagctcgctctctagagaatcaccttctttcgctttttttttttttttgaggtagagtctcactatgttgcccagactagccttgaactcctgggctcaagtgattctccctcctcagcctcccgagtagctggaacgaactatagttgcaccactgcag

SEQ ID NO: 1228 - DNA, 279 bp, Homo sapiens
ctgggcggatctgatcaactaggcaacatcatgtccggatatgagttcatcaacaagttgactggagaagatgtatttggaatcaccgttcctctaattacaagtacaactggagcaaagctgggaaagtctgctggcaatgctgtttggctaaacagagataagacatctccatttgaattgtatcaattctttgtcaggcaaccggacgattcagtggaaaggtacctgaagctgttcactttcctaccccttccagagattgatcatatcatgcag

SEQ ID NO: 1229 - DNA, 199 bp, Homo sapiens
cggccgaggtccagtccaacctgctcctcattattgtataaatgagcagaatcaatatggcggaagccagcttcaattgccaatttggtggcctctaaagctttacttttaggaacctctgcaggcgcataggtgccaaatcccaggacaggcatgaagtgaccatcattcagcttcacacactgatatttcgaatcca

SEQ ID NO: 1230 - DNA, 237 bp, Homo sapiens
  misc_feature 9, 12: n = A,T,C or G
ctgcattgntgnggaattcacaactactcaggctgggaaaatacagattggttcaaagaaaccaaaaaccagagtgtccctcttagctgctgcagagagactgccagcaattgtaatggcagcctggcccacccttccgacctctatgctgaggggtgtgaggctctagtagtgaagaagctacaagaaatcatgatgcatgtgatctgggccgcactggcatttgcagctattcag

SEQ ID NO: 1231 - DNA, 277 bp, Homo sapiens
ctggaggtgcctcagaaggtgcattctgcttcctgcaggggcttgaaacaccaaggcactccagggatcctggagtcaaagcagcagccccggttgttgcactccttgggggtgacatgggggtagccgcagtccaccctgtccttggctggcacggcacactggtttgcagacaggcccacgtactcctcagcagagctggaggacagcaaggccaggaccagccccagcatgcagagcgctctggcagccatgaccaccgtgggctccgggacgc

SEQ ID NO: 1232 - DNA, 348 bp, Homo sapiens
ctgcaactttttttttttgcaattacagagtggtattcagttaacagaacaacaattatttcgtataagctgcatcagagacaactgaagatgaaaaaactaccatccccatatataactaatttgtgctgtgcaccaacaagaacctgctttaaatttccatgccaatttacaacccccatactgtaccaggcaaggttagtggctattgaaaataccaccaggacagggctatctaaagacacattcggtagtgtgttaactatacaaaaaaagacactgtacagtttaaaaacaaatcttacacagccttacatttcaatttttttctttaaaaggagtgagttg

SEQ ID NO: 1233 - DNA, 312 bp, Homo sapiens
  misc_feature 160, 163, 241, 302: n = A,T,C or G
ctgagcgtacggccgcgttcatcccagccgcgggtgcccccacgttgatgacagctacgttgcaattggtctttgggatctgatcatccggcagcttgatggcaagtcgcttgtaggtgttcaggttgcccgcaaagctcctccctcggagtcgaaccgnatnttgaaatctcctctcgtccatcgccttctgcacatcctgagtcatctgcacgcactccatcagcggcaggcgcacggngtggttcccgttcagtgacacgacgcaagctggggtgtccggggtggcctctagcaaggcnatgactgcct

SEQ ID NO: 1234 - DNA, 151 bp, Homo sapiens
ccggccgcgggcataaaaggcgccaggtgagggcctcgccgctcctcccgcgaatcgcagcttctgagaccagggttgctccgtccgtgctccgcctcgccatgacttcctacagctatcgccagtcgtcggccacgtcgtccttcggagg

SEQ ID NO: 1235 - DNA, 250 bp, Homo sapiens
  misc_feature 10, 15, 17, 107, 161, 189: n = A,T,C or G
ctgcaccttngggcntntttctttttaattattcttcctctgactttgtatcccttaatacctacactctccaattgtaagagaaagggggcagggaagcaatatancttccattctaaggctgtattcccgttatgaattactagctgattacagttcanagcattgatcctggaatgtgtgctgganaaatttaaaatactggggttttttgtttaatggtgcctgtttagagttggaagttgaacag

SEQ ID NO: 1236 - DNA, 154 bp, Homo sapiens
ctgatcctcactattgtgggcaccatcgctggcatcgtcattctcagcatgataattgcattgattgtcacagcaagatcaaataacaaaacgaagcatattgaagaagagaacttgattgacgaagactttcaaaatctaaaactgcggtcga

SEQ ID NO: 1237 - DNA, 375 bp, Homo sapiens
ccactggatctttgggattaaagctctgttggatttgtacctcagaggaagatcaagtggctgatcctttggactctgtaaagagcattcttctagtcagagggtggaatggcagcagcaactggaagaaaatgagttttttggtgcccacacccaagagcacacacatgctgcactgtctcggaaagcagggccagctagagccaccatgttcttccttacctcagtttacctgcggcctgcgctgcactgcagatgcccaccctgccctgggtctggccggcggaagctctgtccaaggtccacacacctccaggtttacgccaacatccttgtgccctccccaccttctcttccaacgcattaggtgcattg

SEQ ID NO: 1238 - DNA, 454 bp, Homo sapiens
gtcaagatcaagttcaatatcatcgcctctctctatgactacaaccccaacctggcaacctacatgaagccagagatgtgggggaagtgcctggactgcatcaatgagctgatggatatcctgtttgcaaatcccaacatttttgttggagagaatattccggaagagagtgagaacctgcacaacgctgaccagccactgcgtgtccgtggctgcatcctaactctggtggaacgaatggatgaagaatttaccaaaataatgcaaaatactgaccctcactccaagagtacgtggagcacttgaaggatgaggcccaggtgtgtgccatcatcgagcgtgtgcagcgctacctggaggagaagggcactaccgaggaggtctgccgcatctacctgctgcgcatcctgcacacctactacaagtttgattacaaggcccatcagcgacagac

SEQ ID NO: 1239 - DNA, 483 bp, Homo sapiens
ctgccaggctgaaaagaagcctcagctcccacaccgccctcctcaccgcccttcctcgggagtcacttccactggtggaccacgggcccccagccctgtgtcggccttgtctgtctcagctcaaccacagtctgacaccagagcccacttccatcctctctggtgtgaggcacagcgagggcagcatctggaggagctctgcagcctccacacctaccacgacctcccagggctgggctcaggaaaaaccagccactgctttacaggacagggggttgaagctgagccccgcctcacacccacccccatgcactcaaagattggattttacagctacttgcaattcaaaattcagaagaataaaaaatgggaacatacagaactctaaaagatagacatcagaaattgttaagttaagctttttcaaaaaatcagcaattccccagcgtagtcaagggtggacactgcacgctctggcatgat

SEQ ID NO: 1240 - DNA, 358 bp, Homo sapiens
cctttatggatgaaagtacccagtgcttccagaaggtgtcagtacagctcggaaagagaagcatgcaacaattagatccctcaccagctcgaaaactgttgaagcttcagctacagaacccacctgccatacatggatctggatctggatcttgtcagtgactttatgagagtttctgccacaaggtgcccaagaggagaggaatgggaagagtgccccagcacgtggtgactgcgtgatttctgctcratgcctttmtsatamstgaccacactgasggcgaattmcagcacactggcggccgttactagtggatccgagctcggtaccaagcttggcgtaatcatggtcatagctg

SEQ ID NO: 1241 - DNA, 194 bp, Homo sapiens
ccaaaggttcgtaatgccatctctgcaccaatctcctcccccatagcaataagggcaatccccagaacagccactccctgatgtgctcccatgtcagcaggggcttccttcttgtccttgtctttcttttccttcttgtctttgtcttcctccttctctttggagtcaaagtgttcgctacaaatgtggagcag

SEQ ID NO: 1242 - DNA, 316 bp, Homo sapiens
ccttgttctcactgccctctaagggaacttggtcactcggcacttttaagcctcagtttctccagttcaataataaggacaagagcttttcccatgcattctctttccccgggaaagttgactgaggtgaccagtaatagaattgaaaagggagagtgtcttcagtgcaatgtggcatcctggattgggtcttggaacaaaaacaggacattagtgggaaaattggaaatctgaaaaaagtctgaattttagttaatataccaatttcagtctcttggttttgacagatgtaccatggtgatgtaagatgttgacc

SEQ ID NO: 1243 - DNA, 275 bp, Homo sapiens
aaaagggtgatgaaagtattatgtataatattataatggtaaatatgtgatatgaatttgttgaaatcaacagaatatacagcataaagggttaattccaattcacaaaaatataaataaataggagattaggaattccaggatagaatgcagacaatatagaaaatatctaatgtcattacaaatgtatgaaatcagaagaggtgccaagtgacctcagaaatagtgtagtcaataaaagaataaagaaagtgcacgtcagaactgtaccccag

SEQ ID NO: 1244 - DNA, 235 bp, Homo sapiens
ctgctgcgcttggataacaagtaattcaacgcacgcacttaacagaaatgttaaactataacaagcaccatttgaggattaacaggaacatttttttgaagatttcaaacgaactcgactttcagtataattgtacctaaagtatttataaacagctcatcggagcctctatttgtcatagacttttgagttgattgttgggaccacataataggaccattttttttttgtcttt

SEQ ID NO: 1245 - DNA, 640 bp, Homo sapiens
  misc_feature 565: n = A,T,C or G
ctgatgatgttccacaaaagagcaaaacatacacaatctggttccactctacagaaatcctggaactggactacaaagggaatagacagggtgtggcaggagggggttcctcacggttggagtgcgaggttagggacaggaatagaaggyaggtaataaacattcatgtggtattaacagggcagatgtgtcaatrtatttscaagtttagcataatataggtataaaaattaaataaaaatagtttakatgtgtgtgtatatatgggttaatacacaacacatacctcctagagtcattacctgagaggttctacaagaaaagacagcaaattaacaaaaaatacacccagaatcaagatttgagttttggttcctttcatagcagaatggtatgcaacatttcttggaaaaatggctaatcctagggcttggaaagagaatataggagtaaagtctacaatttctcatggtacccagaaaataagaaagggttccaaaatgaagaatcgctccttttgcaaaccttatggtaacaaatataatatttataaaaagtgaattangtaatatgttaatggagaaataaacatcattatgaaatgctatcttaacaaaaaatargagaaaatwttagtttt

SEQ ID NO: 1246 - DNA, 509 bp, Homo sapiens
aaactttcaaagaatcacttttaggcttacaaaaataaatatttgtcaaaatgttcaataaatattacataaaactagcagcaaaaagtatctagaaatctgtcgtgtgcaaatagttttcttcccaactatcattcccatggtcccaaataaattttagaatctagtcccatccccttcctagacaagctgcgttcaacaatctccaagagacaaagtaagattggaagtttaaggacacgcacacaagacatatatataaaattctctgaatgtgcaataaaagaagtactttgtaaaaagttatgggcaaaatgtacaagggcctaaacctagactaattgaaatagcaccataacaaatgacctcaatactgtcaagtgcacctacttaataaaagttttagaacaaggcacaatacacttgaaaatctattgcactttaggaaatttttgccgtcttcctatgccactgtaaaaagatggagcgttttgatcaccgcattctgg

SEQ ID NO: 1247 - DNA, 310 bp, Homo sapiens
catatgtggaactattcttggaaagtctacaaagtgaaatctatcgagttatttctcatttgcaaagtgatcctttgagtcatttctcataatctataatctgaatgttaatactgatatttttaaaagccctacatcccaacagaccaggccatctagatatttcagcgtggtgtctcaggatgagtaaacaaacagctaaaaatatatgacttatgtaaactagagttacaggagttactagcttttctgaaagggatatattctaagtattttttcttaaaaaaaaaaaaargggggggggggggtt

SEQ ID NO: 1248 - DNA, 640 bp, Homo sapiens
  misc_feature 604: n = A,T,C or G
aaagatataaaactatggagaaaactgctaaagggtatccctgacctttatgatgatgcagctattttcgaggccaaaaaatcattttactgggcaagaaaaacatctcattcctttgtcgtgaatatccttgctcaggctctttatgaattattttctgccacagatgattccctgcatcaactaagaaaagcctgttttctttatttcaaacttggtggcgaatgtgttgcgggtcctgttgggctgctttctgtattgtctcctaaccctctagttttaattggacacttctttgctgttgcaatctatgccgtgtatttttgctttaagtcagaaccttggattacaaaacctcgagcccttctcagtagtggtgctgtattgtacaaagcgtgttctgtaatatttcctctaatttactcagaaatgaagtatatggttcattaagcttaaaggggaaccatttgtgaatgaatatttggaacttaccaagtcctaagagacttttggaagaggatatatatagcatagtaccataccacttataaagtggaaactcttggaccaagatttggattaatttgtttttgaagtttttggnatataaatatgtaaatacatgctttaattgcaattt

SEQ ID NO: 1249 - DNA, 1108 bp, Homo sapiens
  misc_feature 527: n = A,T,C or G
caaaataaatttcaattcaatgaaaagtaaataacttagggatctataaatgacactgcaatgtatcttgttccatttttaacaggaagtccttcatgcaaatgtgtgagtctcccaggatgcatgaagctccagccttttcgtggtgactcaatagagcaattgtaccttacaaatktgcaaccacctccctgaaagtcttctcccacgttattaagtgcaatgyttatggtaaatgtagaagcatcatgatgaggacgaagagaacgctgtcgttcaggggagtattttactacaaaattcagtagtgcaaatcccttcgtataatagcctgcaaagaccttcagtgtaactggtgcaatgaactcccggataaaatgaagccatacattctccagatcaacttgcttcatgtggatatcatcagttgggacattttcataaccaccagatatacggctatcatgatgtttttccccagaccatttgccgtaatgttccatttcttctaccaattcatcacaggnctttttcagaaaatatggggaaccmaaaagacatctggacagggctgttcaamctatattttcagtgaaaatctttgaataatccmcggtttatatacttttccttccagtccacaggattttcaaaaatctgccagaggtcattgttataatgggaagtattgtaattagcagtggataatagccttccaaattcatgtctattagaaatgtacataaatacaccctttggggggctgagcatttggaatgtttccggagtaggggagtctttttccctttgtaaagtcatttctctagcatttcggcaaagagccatatcaggatccagtttatcacgaacaaaatagctcctttcattcatctctgatcggagtgtctttcctttaattaagtacacattagccatatatgggacattccatactcctactctattcccttgaacaatatccacataatcttcagatcgtgcatagtatccatcaggactcaatgctccccagaaattggaccacagctttccatgacgagttacaagaggagcaatgatctttctgttttgttcaatcaaaattttt

SEQ ID NO: 1250 - DNA, 567 bp, Homo sapiens
ctgaatattgaactggaagcagcacatcattaggctttatgactgggtgtgtgttgtgtgtatgtaatacataatgtttattgtacagatgtgtggggtttgtgttttatgatacattacagccaaattatttgttggtttatggacatactgccctttcattttttttcttttccagtgtttaggtgatctcaaattaggaaatgcatttaaccatgtaaaagatgagtgctaaagtaagctttttagggccctttgccaataggtagtcattcaatctggtattgatcttttcacaaataacagaactgagaaacttttatatataactgatgatcacataaaacagatttgcataaaattaccatgattgctttatgtttatatttaacttgtatttttgtacaaacaagattgtgtaagatatatttgaagtttcagtgatttaacagtctttccaacttttcatgatttttatgagcacagactttcaagaaaatacttgaaaataaattacattgccttttgtccattaatcagcaaataaaacatggccttaactaaaaa

SEQ ID NO: 1251 - DNA, 655 bp, Homo sapiens
  misc_feature 161, 175, 193, 200, 211, 212, 223, 228, 324, 396, 518, 546,559, 565, 571, 584, 597, 601, 610, 613, 622, 639: n = A,T,C or G
gaaagaaaccaatttaatgccaccaaacataagcctgctatacctgggaaacaaaaaatctcacacctaaattctagcagagtaaacgattccaactagaatgtactgtatatccatatggcacatttatgactttgtaatatgtaattcataatacaggnttaaggtgtgtggnatggagctaggaaaaccnaaggagnaggaaattatnnaaaagaactgnaggtnaagtataaagtcatatgcctgatttcctcaaaccttttggttttcctcatggcttctggctttatatttttatcacaaaccaagatctaacagggntctttctagaggattattagataagtaacacttgatcattaagcacggatcatgccactcattcatgggtgntctatgttccatgaactctaatagcccaacttatacatggcactccaaggggatgcttcagccagaaagtaaagggctgaaaaagtagaacaatacaaaagccctcgtgtggggggaactgngggctcactcttacttggccttcattcnaaacaggttgggnctttcntgcgangatctctcagggnggtaaaaactttntggntttcaacanaanaggtttggntgaatgattactcggcngacacctaagggatcc

SEQ ID NO: 1252 - DNA, 672 bp, Homo sapiens
  misc_feature 4, 653: n = A,T,C or G
aaantgcaaaaacccagaagaccaataattctgaaacttggcatgagtgtgcccagtcagcagcttgcaaagagaggatgtgtcagttactacaattgctgtactcctttagctgagtccttcaactttctccttcttgccagtaaatactacgttgtaattcatatgactgagatcttagtatcacaggatttttagctcccatgcctccttcaaaattgtttacatggatttgtttctattctctgtaggccatattccaaacacattcacttctaaatccaacacaagtgaaggaccagccaggatgaaacacttcagcaatcattttgttaaaaataacatcctggtcatcaagctaagcataagcacctcttgtataacaattcatcttaaaagcttaaagtacaataataaaaataactgcctgaaaactggaaatgaaatacaacagaaaaactgaagcattagtaatttttgcaagtaacccaggtacagtacatttgatttcatagagggtgttttctgatgtttaaggagagggtagaaggggtaggaaaacttggcaaggaagatggaaacagcacaaccagttattttgcttttaataaagtaaatgtaatgacaggagtagggaggtgacaaacacatcnatatatatttttcttatgg

SEQ ID NO: 1253 - DNA, 644 bp, Homo sapiens
  misc_feature 578, 582: n = A,T,C or G
ccaaatatttgttagaaacttctggtaacttagatggtctggaatacaagttacatgattttggctacagaggagtctcttcccaagagactgctggcataggagcatctgctcacttggttaacttcaaaggaacagatacagtagcaggacttgctctaattaaaaaatattatggaacgaaagatcctgttccaggctattctgttccagcagcagaacacagtaccataacagcttgggggaaagaccatgaaaaagatgcttttgaacatattgtaacacagttttcatcagtgcctgtatctgtggtcagcgatagctatgacatttataatgcgtgtgagaaatatggggtgaagatctaagacatttaatagtatcgagaagtacacagacaccactaataatcagacctgattctggaaaccctcttgacactgtgttaaaggttttggagattttaggtaagaagtttcctgttactgagaactcaaagggttacaagttgctgcccaccttatcttagagttattcaaggggatggagtagatattaataccttacaaagagattgnaganggcatgaaacaaaaaatgyggactattgaaaatattgccttcgttctggcggaggtttgctc

SEQ ID NO: 1254 - DNA, 438 bp, Homo sapiens
aaagggcatttgaggggaggattattgctatgaatgaaaaaaatattttagcttagactaagctacctgccttcaaaatagtttagggaccaccaccatattttattttgtttttatttttgaacatttttctaatgatttggagagaaaactatttacaaaaattccacatatcagtgatacaatttcttgctgtcaccaattttttataatagcagagtggcctgttctaagaaggccatattttttaagttatctttcagggtaacatggaaatactataaagttggatgtcaaactttaatatgttttcagtgttctctaattttttggaatttttgtagactttacacctggaaaaaaagatttgtaaaatcaccggaacaattgtgtgctttattttataggtagtggttattagtattacatccccatttt

SEQ ID NO: 1255 - DNA, 519 bp, Homo sapiens
caagcacaggggagtttatagttctgatgtctttgacattttccctggaacataccaaaccctagaaatgtttccaagaacacctggaatttggttactccactgccatgtgaccgaccacattcatgctggaatggaaaccacttacaccgttctacaaaatgaagcatcttctgagactcacaggagaatatggaatgtgatctacccaatcacagtcagtgtgattattttattccaaatatctaccaaggaatgaccaggagaataagatcctccgatgttcgcaatggtgtggtgtcaggaggctgcctcttagacaatctccagatgtactgtgatgtgagtttgaaaaagagttcctgaagtaccacatctgggagacatgccactagctgagcttcccaaaagtctaccaagagctgaggaattgtatcttcatccttagcacaaagcaccttaaaaacagtaaaaggagcctctatattccagataaatatagcactgataaagcgacag

SEQ ID NO: 1256 - DNA, 178 bp, Homo sapiens
ccatgcaggagttcatgatcctcccagtcggtgcagcaaacttcagggaagccatgcgcattggagcagaggtttaccacaacctgaagaatgtcatcaaggagaaatatgggaaagatgccaccaatgtgggggatgaaggcgggtttgctcccaacatcctggagaataaagaagg

SEQ ID NO: 1257 - DNA, 255 bp, Homo sapiens
gggtccacttgctgccccatcattgtatcaccttccttcaatcttttggctgccactctcatgtagggatccacggtgaggaacaaagcttcaagcaggacctctccattttttaagggtgggagctcagatgtcttcaactcaaagtcactattagtaggatagccaacaaagtgcttcttcagggtccatgtcttagtacgaaccatcctgaagctcaggagcccgaaggttccactgcctggggaaggcggc

SEQ ID NO: 1258 - DNA, 630 bp, Homo sapiens
aaaactaaaagcatcactgctgaactccagctcagtcttcccattttataatgaggactctgaagtttatagaggtcaaggacttgtccaaagctttagatatgtagtgtctgtgcccttttcctctaagtttctcctagagaatgtgggggctcaggaacagagaaaataaggtgcaaaaagtagaaatgggtggtgtttctcaaagtgtggtccatctgcatcctagtgactggggtgcttgttaaaatgcagattgctgggccttatcccaatctgaccaaatcatctcaggatctaccttttgaacaaacttgcctaggtcaaattcactcttgtggaagtttaagtacttcagaaacaagacagccacagaaggtgcacctgctaatttggtggcttccagtgcctcatctgtaacttctggtgaaatcctgagatgtcttactttacattgtttacatcccataacattccaacatttagaaattcactcgagcttatttttcttacttgtttagcactaaatgaaaatagctccctgaagttaaggagtttatatacagtaattcatgcaagtgtgtaaattaaacagatgactttcccccctaatatctaatgcacagcaag

SEQ ID NO: 1259 - DNA, 159 bp, Homo sapiens; identical to SEQ ID NO: 235

SEQ ID NO: 1260 - DNA, 115 bp, Homo sapiens
aaaaatactataatttcaaaacttccaaatttcaacagatgccagtgttctctccttttttcatatgggaaaatttctttcaaaattatttgacgcttggacaaaaattccacag

SEQ ID NO: 1261 - DNA, 280 bp, Homo sapiens
aaaatattgtttatctttatttattttgtggtaatatagtaagtttttttagaagacaattttcataacttgataaattatagttttgtttgttagaaaagttgctcttaaaagatgtaaatagatgacaaacgatgtaaataattttgtaagaggcctcaaaatgtttatacgtggaaacacacctacatgaaaagcagaaatcggttgctgttttgcttctttttccctcttatttttgtattgtggtcatttcctatgcaaataatggagcaaacag

SEQ ID NO: 1262 - DNA, 144 bp, Homo sapiens
aaattatttgatgagttccacttgtatcatggcctacccgaggagaagaggagtttgttaactgggcctatgtagtagcctcatttaccatcgwttgtattactgaccacatatgcttgtcactgggaaagaagcctgtttcag

SEQ ID NO: 1263 - DNA, 487 bp, Homo sapiens
aaacatcttgataatttgttgttgagagctgttcattctaaaatgtaatgaaattcagtctagttctgctgataaagatcatcagttttgaaaggttactgattttcctcttccctcttagttttttacccaatatatggagaagagtaatggtcaatcttaacattttgttttaattgtttaataaagctgctgggcagtggtgcagcattcctacctagtgtcataaaagcaaaatacttacatagctttcttaaaatataggaatgacattacatttttaggagaaagtaagttgctttgcaccgcctacttaattcttttccatatattgtgatacaaacttttgaatatggaatcttactatttgaatagaaatgtgtatgtataatatacatacatacataagcatatatgtgtgtgtgtgtgtgtatatatatatatatgcatgctgtgaaacttgactacacaacataaatcacttttt

SEQ ID NO: 1264 - DNA, 250 bp, Homo sapiens
ctgcttcaacagagtggcagcaaccaagctggagtccaagccccctgataaaaggcagccaatccttctgtctgtcatcaaacgtttctttacagcattattaaaaaggatcctgaggttgttcttcacagtttctatctcaaaacctggaaagagtttctccacattgtcatagagggcgtgcaggggttcatcccgacagtgatgatatttaaccatttccacggatgcaactttgccatttggcttt

SEQ ID NO: 1265 - DNA, 394 bp, Homo sapiens
aaatatttgttccaacctttttcgttggtggcatttatggctttggagcactgtcaggcccatgttcattaccgtgagctcctgtgcatctcctaatttccaaactagcctggaaaacgcctccattgaccatgattggttcatggtcctgtgcatggaacatcatatgttcagggagataaagaactctgatagtggcacctgggtaaaaagtacaatccattatatctggatatcaagatcttttgcagttgaagagaggtattgccacagagaaaattataggagcagaagaaagtcaatgaaagtcaatgatgacactccattaggaaccagaaagatggtatttatttatacatataataggtgtaagagattagaggaagcctgtcac

SEQ ID NO: 1266 - DNA, 229 bp, Homo sapiens
ccacagttgtatcatatagcatctctaacatttcatctaggattatctagtatagatcttactatatttggggctatgttgtatacaatgttaacaagaacatatcttctctgcatatatgtgtgaattataaagaaaagcatgagaatgactctaagttcaacaaacatgggtgaatctctatgtgctcccagtgtcctggatgggctccccagcaagccattcctcc

SEQ ID NO: 1267 - DNA, 722 bp, Homo sapiens
  misc_feature 658: n = A,T,C or G
aaatcttatcaactttccaaattttcatactaaaatatattattgtattaatacaaactacagtattatacactacactgtgtaataaataaagaaatataaaaataagacacataaatataaaagttttctaaaactaaaagtacatatgtcagtaagaagggtattaatactgccaggtttgaagacatacagtacaaaaatgttgcacagatctataaactaaaagaaataaaataatactgataggtaaaaatcagctaatgttgttaataaattgggtccataataactaacatttggaaacagttatgagccaaataacaatagcatgtccatgtctgaaatgcaagtacatggataaagcagattagaaaatttccctttcgtttctgtagagaaattctgaaaatcaatcaacataaaatcaataccgaggaattgaaggatgaaatgtcccagtgtttcagtttctctgacagagtcagtggttttaagttttatttgggaattttgatacaagagacaaatcaacaaatgctagttattgtaggccacacattggatgaaggcgggttagagccttgaaaatactgagaaatggcacttacagcacacaggtcttgcttaagggcaaaggagatacaaagcttcatgncatatccttcatatggtaccacatattcaaacaccatcccaacactgatctgatgattttgctg

SEQ ID NO: 1268 - DNA, 407 bp, Homo sapiens
gatgacacaagcagctaataaccatttctgggtttctgcctaaccccctaattgtctgttaaagccaattctctgggtgtcccagtgagtggtggctttttttctttccacattggcacattcacttctcccactcttggcatgtaagaaataagcatttacataattggaaaaatctggatttctgatgccaaagggttaaagcttcttggatttcatttcattgatatacagccactattttatttttgatcagtggcctttgggccactgttcagggtactgaccatcagtgtcagcattagggttttggtttttgtttcttttgggtatttcttttttggcacatgtgaatcttgttttgtgtaaaatgaaattactttctcttgttctctgatgatgggttt

SEQ ID NO: 1269 - DNA, 675 bp, Homo sapiens
  misc_feature 613, 629, 643: n = A,T,C or G
ctgaaaaagagtgatcctcaatatcctaactaactggtcctcaactcaagcagagtttcttcactctggcactgtgatcatgaaacttagtagaggggattgtgtgtattttatacaaatttaatacaatgtcttacattgataaaattcttaaagagcaaaactgcattttatttctgcatccacattccaatcatattagaactaagatatttatctatgaagatataaatggtgcagagagactttcatctgtggattgcgttgtttcttagggttcctagcactgatgcctgcacaagcatgtgatatgtgaaataaaatggattcttctatagctaaatgagttccctctggggagagttctggtactgcaatcacaatgccagatggtgtttatgggctatttgtgtaagtaagtggtaagatgctatgaagtaagtgtgtttgttttcatcttatggaaactcttgatgcatgtgcttttgtatggaataaattttggtgcaatatgatgtcattcaactttgcattgaattgaaattttgggtggatttatatgtattataccctgtcacgcttctagttgcttcaaccatttataccattttgnacatatttttacttgnaaatatttacctgncccggccggccgtcgaaagggcgaaattcaac

SEQ ID NO: 1270 - DNA, 268 bp, Homo sapiens
ccatcctgggcggagctaaagttgcagacaagatccagctcatcaataatatgctggacaaagtcaatgagatgattattggtggtggaatggcttttaccttccttaaggtgctcaacaacatggagattggcacttctctgtttgatgaagagggagccaagattgtcaaagacctaatgtccaaagctgagaagaatggtgtgaagattaccttgcctgttgactttgtcactgctgacaagtttgatgagaatgccaagactgg

SEQ ID NO: 1271 - DNA, 307 bp, Homo sapiens
cctactcttctccgtccattgtactatctgcccgtggtggggatggcagtaggatcatatttgatgacttccgagaagcatattattggcttcgtcataatactccagaggatgcgaaggtcatgtcctggtgggattatggctatcagattacagctatggcaaaccgaacaattttagtggacaataacacatggaataatacccatatttctcgagtagggcaggcaatggcgtccacagaggaaaaagcctatgagatcatgagggagctcgatgtcagctatgtgctggtcatttttggagg

SEQ ID NO: 1272 - DNA, 798 bp, Homo sapiens
  misc_feature 613, 619, 703, 726, 773: n = A,T,C or G
ccattgctagaaattgaatcacaaataatagctaataatttttcatttttcaaaaaagatcatttggatagcagctatgtataaaatggaaaataaaaaattattctattttgcatgaatagttcagactttcccataccacagccaagcagtaactaaaattaggatcttaattttcaatgataaaaggtctaaggttcatttaattatgctcctttaacactgtctttctagatttttcacccagtattttcaaaatttgggaatgtaaacaattgatatatttattgtatgttggctagcagttcatccttctgcaaaatatgcattcagagaaatgtgaagcttgttttaatgaagacttaaaccatttgtgtcatttgtgttttcatattcaaatacaccaaattaaaattctgaacctatatttttcatcattaacttcctaatataccagaacatatacctttttcatgtaaagttggcaatgggatatggcagttttatttttgaaaaatatgtaacatgactttaatatttttatagttttcagaattagaaacataggaagggaaaatgttttaattagataagtcaactttttatgggctgnagtggngactataatagcaaattataaagcattattaaatggttataataattttaatattacctcattatgaattaactaaaataaagnggagtgatatttttaatgggtgntcatactggagctcctgagatatatgatttgctattgactcactggntgattgaataatatattactcgcgg

SEQ ID NO: 1273 - DNA, 664 bp, Homo sapiens
  misc_feature 623: n = A,T,C or G
aaaatataccttttcacaggtagcaagaaatagtacatgtaataagtctttatgactggaatgatccagaaatatcacaaagcatgagtaaacacatatataaaagtagctcatcatttccaaaagttaacctttagcctttgtgtaaaataaatggtgccaacaatctttataatgtagcaagctttccctgtttaatatccaaaaaatggagggtggggaggttgaagaaaaataagaaaagttagcaaataagatagtgaaaagaccaatgcagagaaaagtttatgtaatcaaatcttgctttgtctccacattatcacattttaagtggataaatttatgtaaacagaaaaagatgtccacaaaaccatatctatagatgtcatttggaagcatcaagaaattgataagtatgtggtgaattaaaattacttttataatgttttgctttcattaatgtttgttattgcaaaaatgtaagatttcctacaattttgtcttcaaatcccaatctagcccttcaaacttttatccaggttctccagaatatttggagtctttgttatcaaagcacaaggaaagctggcattcattatcagacttcgctgctttacaatganttcaaatcatttcatgatacaaataaagtgcctctgactgg

SEQ ID NO: 1274 - DNA, 153 bp, Homo sapiens; identical to SEQ ID NO: 239

SEQ ID NO: 1275 - DNA, 504 bp, Homo sapiens
aaaattctgataaaaatttactcaattacattttatacattaatatttagtgaatttgtccaaaaaggctatgtttaatttatgtgtaaaaataacaaaagatgtatcagtcagtctctgggcaataagaaaggaagaaagccttgctagaaataataaataatctcacgcaaaaggccaggtgacataagaatactacaataatcaatatgttttctttgtatttacaataaaatccatctgttaacactgtgatagaaaaaataatcagtccacatcatgtaataaaaacaggctttgaggatgattatacctcttataataaaaacatacaaggatttctcacagctaaagtacttttcaactttgacaactaatgacagtcatgggtgaaggtaaaactgacagagtactttagatcagctatgtcctacagtcaaggaatcaagggcattacccatttaccaagcagcaaaaagcactttcatttttccagaactattt

SEQ ID NO: 1276 - DNA, 533 bp, Homo sapiens
gacaatgatgtcactgtttggagcccccagggcaggattcatcaaattgaatatgcaatggaagctgttaaacaaggttcagccacagttggtctgaaatcaaaaactcatgcagttttggttgcattgaaaagggcgcaatcagagcttgcagctcatcagaaaaaaattctccatgttgacaaccatattggtatctcaattgcggggcttactgctgatgctagactgttatgtaattttatgcgtcaggagtgtttggattccagatttgtattcgatagaccactgcctgtgtctcgtcttgtatctctaattggaagcaagacccagataccaacacaacgatatggccggagaccatatggtgttggtctccttattgctggttatgatgatatgggccctcacattttccaaacctgtccatctgctaactattttgactgcagagccatgtccattggagcccgttcccaatcagctcgtacttacttggagagacatatgtctgaatttatggagtgtaattt

SEQ ID NO: 1277 - DNA, 78 bp, Homo sapiens
ccacaggaagttgcaaaaattagatggactctgtgtagctagccactcttgagtgtcaggtctgcatatgtgagtttt

SEQ ID NO: 1278 - DNA, 560 bp, Homo sapiens
aaatatctaaaacaatggcccactgaagaaaggaacaattaactctttaattaattccttaggataagtacccagaaatttaacagctagggcagacttctaatacaataccgaaagtccttccaaaaaccaagtggttgccaacttatgtcccttagcattataacattcttgagccaatagtgtaaaaatacgctgacaattttataggcaaacattactcaaggtatcttactttccacttattactaaagtaattaacccctaaatagatgctcctcaacagtgggactacatcctggtaaacctatcataagttgaaactatcaagttgaaatgcatttagtacccggataaacctatcataaagttgaaaatttgtaaattgaaccagtgtaaatcagaggccatcttacttcatactcatgaagcaactatagtgggatatttttcaacttacgagatagcctaggcttgttgaaacactgtcctaatttactggctctctggtaattaagtcataaatggtcaaacatcaaattctagaaaagcatatattt

SEQ ID NO: 1279 - DNA, 580 bp, Homo sapiens
aaaggagattgtttcaaaatatttttgcaaattgagataaggacagaaagattgagaaacattgtatattttgcaaaaacaagatgtttgtagctgtttcagagagagtacggtatatttatggtaattttatccactagcaaatcttgatttagtttgatagtgtgtggaattttattttgaaggataagaccatgggaaaattgtggtaaagactgtttgtacccttcatgaaataattctgaagttgccatcagttttactaatcttctgtgaaatgcatagatatgcgcatgttcaactttttattgtggtcttataattaaatgtaaaattgaaaattcatttgctgtttcaaagtgtgatatctttcacaatagcctttttatagtcagtaattcagaataatcaagttcatatggataaatgcatttttatttcctatttctttagggagtgctacaaatgtttgtcacttaaatttcaagtttctgttttaatagttaactgactatagattgttttctatgccatgtatgtgccacttctgagagtagtaaatgactctttgctacatttt

SEQ ID NO: 1280 - DNA, 307 bp, Homo sapiens
aaacacatacgaagaaatcaactgtgattatgaagtggcagccagctaaatatgtcttgtatttgctctcttcctttttttgcctaactcatcctttacttccattcctgcttccatggtaatgcaggctcaaataaattactaggatacaagattacttcaagcctcttttctgtggaactcataatatgataagcatttgttacaagattgcctgtagttgtttaggggataaattatattagggaaagaaagtctttctttagttggttaaattttctattataattgggtactaaatttattt

SEQ ID NO: 1281 - DNA, 235 bp, Homo sapiens
aaaatattttaatagttacatagcactttagtttgctgatttaatttatcccaagggacaaggatgttaatgagaaaactgactagatttcagatcacagattttaagagaacaaggatctcaaaaccaaataccctctgcttaaagtgttttttgtgtttttcactactgaaaatgtttagagattgacttacctattgctgatactcaaaacatctgatatcttaatattttt

SEQ ID NO: 1282 - DNA, 230 bp, Homo sapiens
  misc_feature 194: n = A,T,C or G
aaagaatttctttataagattkactgtmtaagattaatagcattcgaagatccccagacttcatagaatactcagggaaagcatttacctcsgtcgctgaccackctargggcsawggccagcacactggcggccgttactagtggatccgagctcggtaccaagcttggcgtaatcatggtcatagctgattnctgtgaggtaccagattgcctgtagttgtttagggg

SEQ ID NO: 1283 - DNA, 638 bp, Homo sapiens
aaacacaacagctataaacctgaacacatatgctatcatcatgccataagactaaaacaattatatttagcgacaagtagaaaggattaaatagtcaaatacaagaatgaaaaacgcagtacatagtgtcgcgaactcaaatcggcatttagatagatccagtggtttaaacggcacgtttttgcttataaaaaaagtgcaaaaaagatgtggtttacaagttaaagctacagaatccctttttgctgtaattgcaccagttttaaagcctctggacagagcagtatttcgtttaaaactttgttyttcttaaaagcttacagtgtttggctaattctcctcycctttttacaagacgggggccggagggtggacactggtggcaggttaagggatactgtcactttaagaagcctgcagattgaagtgtaaacatggagaaattaggggctgattttttaaactgtgtgagatattaaccagccgccctgttataaaatcaggaaatccaaacagcgatttacaccgattaacaccccctttatatattttttacaaaaatacactgagaaaataatcaaacgttttcatctctcttgtctttttttgttttttaaaagtgtcaaaagtctacattt

SEQ ID NO: 1284 - DNA, 745 bp, Homo sapiens
  misc_feature 715: n = A,T,C or G
cgacggtatcgataagcttgatatcgaattcctgcagcccgggggatccactagttttgaatttacaccaagaacttctcaataaaagaaaatcatgaatgctccacaatttcaacataccacaagagaagttaatttcttaacattgtgttctatgattatttgtaagaccttcaccaagttctgatatcttttaaagacatagttcaaaattgcttttgaaaatctgtattcttgaaaatatccttgttgtgtattaggtttttaaataccagctaaaggattacctcactgagtcatcagtaccctcctattcagctccccaagatgatgtgtttttgcttaccctaagagaggttttcttcttatttttagataattcaagtgcttagataaattatgttttctttaagtgtttatggtaaactcttttaaagaaaatttaatatgttatagctgaatctttttggtaactttaaatctttatcatagactctgtacatatgttcaaattagctgcttgcctgatgtgtgtatcatcggtgggatgacagaacaaacatatttatgatcatgaataatgtgctttgtaaaaagatttcaagttattaggaagcatactctgttttttaatcatgtataatattccatgatacttttatagaacaattctggcttcaggaaagtctagaagcaatatttcttcaaataaaanggggttaaactttaaaaaaaaaaaaaaaaa

SEQ ID NO: 1285 - DNA, 190 bp, Homo sapiens
cgacggtatcgataagcttgatatcgaattcctgcagcccgggggatccactagttattaatagtaatcaattacggggtcattagttcatagcccatatatggagttccgcgttacataacttacggtaaatggccgccaccgcggtggagctccagcttttgttccctttagtgagggttaattgcgc

SEQ ID NO: 1286 - DNA, 153 bp, Homo sapiens
ctgcatctttctacaattctaccagcaatatatgagggttacaatttctcyccatctttgtgaacgcttgttagagtctgtcctcttttcttccattctgtgggttggctttttactttctaaatggtagaaccttcaaagcacaaaggtttt

SEQ ID NO: 1287 - DNA, 232 bp, Homo sapiens
aaaaacacaaaacactagaacagttgctatgaaattactgataatgatccctttaataaactgcaattaaccactaatatagaaattcaatttaagcaagaagttttatatattatactttacagaaaaaaataattttgaaaaagtaatgmcaaacagagatcaaacatttagggcattagttactgcattctctttttagaatatacattaagtaacactagtaaaattt

SEQ ID NO: 1288 - DNA, 90 bp, Homo sapiens
aaacttagtgactatttagttcaattgytcatccattttttatttgcttttataattgcctccttgttttggtatattgtaaaataattt

SEQ ID NO: 1289 - DNA, 670 bp, Homo sapiens
aaatcacaaagtaaggcaccattggattaaacatttctcctggcttttactaagtaaaatgcatagtgaaataaatactgaacactgagttttaatactgtaatacatttcaatataaaataagaggtgaatgttaaaatactgtattacatgttgaatacatttatctgaaaatgttataaaaaaacacacatgtaagctctgatttcagggaagaaaaattcatttttgtaattttccatagtttaagattttaccacagaacttattcatagttttagatgcaattaggttgcaaactttcaaagaaagggtgtaggtgtattaatgaaacagtcacttaaacactacattctaaaacaatctattctggatgaatggcaactttgagctatcaccctgtttcagatttagaacggtacctgccaagttcagatatgcaaaggaattgtccaattcttactaccccttataaaattcagactcactttctctgagtcagacttttctccgtcatattttctaggaagggcaaattccatcttttgtgaaatgggtcattaggctttatcatagggatgtttttcactgttgaaatcagataaaagaatcccaaataaatgatgctgctaaattaccaaactgctagagattaaaaaaattttttttt

SEQ ID NO: 1290 - DNA, 352 bp, Homo sapiens
aaacaatgctacacccatttttggcaaagtgctgtattgttcagtctgtgtacaaaactgaccatctatgaaccaatcagtataaaaaatttctataaaaacaaaatttagacagtggctcaagaaaacaagctgccatttatgcatagattgatgtacagtaacctaaccaaatgtcccttttgaattttcaagttactgaaaaaaaatgtgtcgagaaacacattaagaaggcacatgtacagtctacaatactcttcagtctccctaactcatgccctgcccctataaaggaaatatgttcacaattttacttgagaaaaaaaaacaaagccacttaaaaaaaaaaaaa

SEQ ID NO: 1291 - DNA, 99 bp, Homo sapiens
aaaaattatttaaggtaatggtgttacgaatggtttaaaaatgtctggtgacttgcttatttttaagtgatcaccattaagtcagaaaaatgtattttt

SEQ ID NO: 1292 - DNA, 295 bp, Homo sapiens
aaatatacctttatttctcaaactcaaagctttatcaagttctaacacattttgcattgacaagtgattttatctgcatcaagtaaggttagtgaccaccacgaaagaggaatccccagacctcctaggcactaagaaatatttcaaaggctatgcaaatatagaacaaaaagctttcaatttagtctaattggtatctatttttcatctatattaatttggaaataagttgctaccttagaaaaattacatttttatccattaaaataaaacaccagataggttgagttttttt

SEQ ID NO: 1293 - DNA, 256 bp, Homo sapiens
agattcacttcaaagtgaaaatgacaacacatctcaagaaactcaaagaatcatactgtcaaagacagggtgttccaatgaattcactcaggtttctctttgagggtcagagaattgctgataatcatactccaaaggaactgggaatggaggaagaagatgtgattgaagtttatcaggaacaaacggggggtcattcaacagtttagatgttctttttattttttttcttttccctcaatccttttttattttt

SEQ ID NO: 1294 - DNA, 90 bp, Homo sapiens
aaaatacttagctttattaaagacatggtactaaaaataacagattccaacatttgctctatttctacttatatatcataaataagacag

SEQ ID NO: 1295 - DNA, 519 bp, Homo sapiens
ctgtcgctttatcagtgctatatttatctggaatatagaggctccttttactgtttttaaggtgctttgtgctaaggatgaagatacaattcctcagctcttggtagacttttgggaagctcagctagtggcatgtctcccagatgtggtacttcaggaactctttttcaaactcacatcacagtacatctggagattgtctaagaggcagcctcctgacaccacaccattgcgaacatcggaggatcttattctcctggtcattccttggtagatatttggaataaaataatcacactgactgtgattgggtagatcacattccatattctcctgtgagtctcagaagatgcttcattttgtagaacggtgtaagtggtttccattccagcatgaatgtggtcggtcacatggcagtggagtaaccaaattccaggtgttcttggaaacatttctagggtttggtatgttccagggaaaatgtcaaagacatcagaactataaactcccctgtgcttg

SEQ ID NO: 1296 - DNA, 419 bp, Homo sapiens
aaagcaaacagcagaaaccagaagcttctgaccctctaacatgtattactgtccaacccaccatgagaagtatgttcacttggtgacaacaaagagactccgtatcatatgtatgttaatgaccagattgttcatatgggatttttcttaacagattatcaggttgagaatgattctttttctccaagggcaagaaaaagctggctaaatgctagttaattaaatccattctcaattttgaactgtagagaagaacctgacttgaatgagattttctaaaggaagacatttcttgctcaacctcaggtataattagattataaggaatctcacgtccagaattttatctgctgattgttagtatggtaggtaattggccttaggacactatttctactagaaccctttacattattttt

SEQ ID NO: 1297 - DNA, 199 bp, Homo sapiens
caggtctgaagattttacatgcagataccagataccttaacttgtatttctttagtcatcttttggcttggaagtttcctctgttgtctttgctgaatccttcgctttacctccattcttaggtgctttggagctggaagcagccttcttgcacttatcctttgctgtgttctgtgaggtttctgtagtggagggacag

SEQ ID NO: 1298 - DNA, 484 bp, Homo sapiens
  misc_feature 437, 456, 467: n = A,T,C or G
aaatacacttgaaaagtaaaatgtttttctagcttttccctcagggcgtaacaccacaccattcataacaatgctattttccaaaggtttcaattagatttcctcagaagcatacctgaactgttaatcattacaactcctttgtgaaacatgggactggttgattacccagtgtaatcactggctgaaacctcagcacactgtttttcaccccagtggaggcaggttttcacctcccctctagctgtacccctctcttaatgcccatattagagaactgtgatcttctttctccactagaaatgttcactttcatcaggtaagggataaaacaaaaacaagagacagaagatcttaaaaaaaaaaatagtaatagggcaagtaaactcagtgaggttagaggaatttgtttggggggcattctatgttgttagytncatatcatgttcagtttgntggttctaganccctctgaaatgcatta

SEQ ID NO: 1299 - DNA, 419 bp, Homo sapiens
aaagtccatctttgcaaattatacgttgctataaatacattgtgtatttggcattatgtgaatttgtttaatccagtgtcaattgtctaatggtctaaagtgtcccattgaagttataatctggatgaactgaacaataagagaagttttcttcattagcccaattgtttatcactcaattcctactcctgcccatggtttcttccaccttcctctggagaacataaagagattctagatctctgtataaggtggtttgctttagcttgaaatcatcagtgaggattatacatgggcaatgtccagaaatcacattattgctcatagaccgtgtagtcttgatctaacggataactgtacattgtcttcactaagaagctagggtggttgtccttgatattgggacattgtagacttgg

SEQ ID NO: 1300 - DNA, 182 bp, Homo sapiens
  misc_feature 3, 5: n = A,T,C or G
ccntngaattgtgtgcatagggaagcactcacccaatgagactttctccaatgtggactctgtgtgtcagggaatgaatgtagaaaaattcactttggagggttatcakctcaactagtaagaagcattaatattattaaagtgaagaaactgcagagaaaattacagaacaaaactgtagg

SEQ ID NO: 1301 - DNA, 312 bp, Homo sapiens
aaagtttttatctctgctgaggcttcacatctgtttgctcaattttatttttatttcaatccttgagcatgtttataatatagtagtatccccttattgtggctttactttcctcactttcagtcacccacagtcaaaaaatatgaaatataaaactccagaagtaaacagtttataaattttaagtcacactttgttctgaggaatgtgatgcaacctcccgccattctgctgtatccagttcaggatgtgacatacccctttgctcagcagatacacaattcctgcttcctgctcattagacatttgcag

SEQ ID NO: 1302 - DNA, 109 bp, Homo sapiens
attcttagattatatgtgtccatctttgcagctttctgagagtaattttatttgttgtcttctgaaatgtacatgtatacatgtacctactgagtgctatgtgattttt

SEQ ID NO: 1303 - DNA, 330 bp, Homo sapiens
ccagagttacttggatcagcatttaggaaagtaaaatatagtggaagtaaaactgactcatccaactagacattctacagaaagaaaaatgcattattgacgaactggctacagtaccatgcctctcagccagcccgtgtgtataatatgaagaccaaatgatagaactgtactgttttctgggccagtgagccagaaattgattaaggctttctttggtaggtaaatctagagtttatacagtgtacatgtacatagtaaagtatttttgattaacaatgtattttaataacatatctaaagtcatcatgaactggcttgtacattttt

SEQ ID NO: 1304 - DNA, 170 bp, Homo sapiens
ccactgtagtctgcatatccctgtccatatccatagttcccatagttatacccagtataatcatatccgccatagccactatagttttgatcaccaccataggcactattgtaatttccatatccttgatcataatagttattaaatccttggttccagttttggccctg

SEQ ID NO: 1305 - DNA, 468 bp, Homo sapiens
aaaaataaatatttatactccagcttttgtgtatttggtgtacatcaccacttatgcaaatcaaggatcagaaaactggaggttagccatctccattatttccttttgcacattgggtacagtgggtggcattagtatgcactagctgcaaagtcacagcaccttatggaaataagtatgtttattataataaaaaaaagttaagctgcatctctgtagattatttactttgcagactgtaaagctgccctatcttttccagcagaatttactcttccattcttaattcttttttgaaatatcttaaataatttaacattcctttataacttcttaacagtgtcaaaactggggtagaagggattttattttttcccaaaagggttccatctttgctatctgttgatcagccttagaaaatctaagtatgatcaataaattttaatggttgatggcatcctgtgtcag

SEQ ID NO: 1306 - DNA, 326 bp, Homo sapiens
tggtaaagaactacctgttaatgcacaaaactatgtgcgatttattgaagatgagcttcaaattccagttaagtggattggtgttggtaaatccagagaatctatgattcaactcttttaatgattgccagtaatgcaagaaacactccttgagagggaggggaaaagactttcttaaatatttcatttatgacctgcaaattcaagaataaagacactgaagtaagtttgaagccctacagytgtttccagtcttttcagatggatgcctactgtggagattaactttggcatattccagtgtcagctttctttagctggaattg

SEQ ID NO: 1307 - DNA, 614 bp, Homo sapiens
  misc_feature 294, 442, 458, 465, 580, 592, 609: n = A,T,C or G
aaaaattattactgtaagaaatagttttataaaaaattatatttttattcagtaatttaattttgtaaatgccaaatgaaaaacgttttttgctgctatggtcttagcctgtagacatgctgctagtatcagaggggcagtagagcttggacagaaagaaaagaaacttggtgttaggtaattgactatgcactagtacttcagactttttaattttatatatatatacattttttttccttctgcaatacatttgaaaacttgtttgggagactctgcattttttattgcggnttttttgttattgttggtttatacaagcatgcgttgcacttcttttttgggagatgcgygtytgytgatgttctatgttttgttttgagtgtaggctgactgttttataatttggggagttctgcatttgatccgcatcccctgtggnttctaaaggggatggncctcagnaactgttgcatggatcctgtgtttgcaactggggaggacagaaactgggggtgatagccagtcctgccttaagaacatttgatgcaaagaatgggaccctgccccggggccgggncccctccgaaangggggggaaaatcccangcacc

SEQ ID NO: 1308 - DNA, 304 bp, Homo sapiens
ctgtcttttggaggacgtacgtaataaggttttaatttagtaaaccaatcctatgcatagtttcagcactagccaaacctcaccaactcctagttctagaaaaacaggcacttggcagccttgtgatgtcatacagagaagtcacaggcagtacctgagggtctgtaggttgcacactttggtaccagataactttttttttctttataagaaagcctgagtactccacactgcacaataactcctcccagggttttaactttgttttattttcaaaaccaggtccaatgagctttctgagcag

SEQ ID NO: 1309 - DNA, 289 bp, Homo sapiens
gggatttccaattaacagtattaccagataaatattcttggtccaagcagaaaatatcaacaaaaagagccttcttctcctgtaaatcttaaatgcctacatcactctttatgatacatggatcatcttatgtggatacttaaatttttcatgtctgcttcttttgcctctcccaactatactatgaggaaattcggaacaaagacatttttgtaatatttcttatctccttcacacctagtatagagctgattttacaaaggcatttaagagatatttgaattgattt

SEQ ID NO: 1310 - DNA, 534 bp, Homo sapiens
  misc_feature 480, 490: n = A,T,C or G
tgctttgcattttctgatgtattacatgactgtttcttttgtaaagagaatcaactaggtatttaagactgataattttacaatttatatgcttcacatagcatgtcaacttttgactaagaattttgttttacttttttaacatgtgttaaacagagaaagggtccatgaaggaaagtgtatgagttgcatttgtaaaaatgagactttttcagtggaactctaaaccttgtgatgactactaacaaatgtaaaattatgagtgattaagaaaacattgctttgtggttatcactttaagytttgacacctagattatagtcttagtaatagcatccactggaaaaggtgaaaatgttttattcagcatttaacttacatttgtactttagagtatttttgtataaaatccatagatttattttacatttagagtatttacactattgataaagtttgtaaataattttctaagacagnttttatatangctacagggtgccctgattttcttattgaatttggttagactag

SEQ ID NO: 1311 - DNA, 114 bp, Homo sapiens
aaaatttgtaggagttgtagactacctaaatttttaagttatggyatttggtcataggttgactgggtaggtaaagaaggaaacagacaagaaaatggcttcttgaggtggcag

SEQ ID NO: 1312 - DNA, 95 bp, Homo sapiens
gggcgggtaaaggtaggccgcgagagcgaggttaggagaggataggaggccgcagtactgctcacacgctccgctcttctcccactctcgactct

SEQ ID NO: 1313 - DNA, 519 bp, Homo sapiens
aaatgatacagtattttaggtatgatttaagactatgatttacctatacattatatatattttataaagatactaaaccagcatacccttactctgccagagtagtgaagctaattaaacacgtttggtttctgaataaattgaactaaatccaaactatttcctaaaatcacaggacattaaggaccaatagcatctgtgccagagatgtactgttattagctgggaagaccaattctaacagcaaataacagtctgagactcctcatacctcagtggttagaagcatgtctctcttgagctacagtagaggggaagggattgttgtgtagtcaagtcaccatgctgaatgtacactgattcctttatgatgactgcttaactccccactgcctgtcccagagaggctttccaatgtagctcagtaattcctgttactttacagacaggaaagttccagaaactttaagaacaaactctgaaagacctatgagcaaatgggctgaatacttttttttt

SEQ ID NO: 1314 - DNA, 518 bp, Homo sapiens
  misc_feature 247, 270, 329, 357, 419, 440, 498: n = A,T,C or G
ccatggtgggtgaagacgctgatctgccctgtcacctggggttttttatgagtgcagagaccagggagctgaggaaacccgagytccagcctaaggcaggtggtgaacgtgtatgcagatggaaaggaagtggaagacaggcagagtgcaccgtatcgagggagaacttcgattctgcgggatggcatcactgcagggaaggctgctctccgaatacacaacgtcacagcctctgacagtggaaagnacttgtgttatttccaagatggngacttctacgaaaaagccctggtggagctgaaggttgcaggtgagcctccaggttttgntctgagaacacttctctgtaggatctanagcagatgcagagtccctcttccaaaagtactgcagacactcctggctgctcactagcaatngtctgcactgcctcccaactnagcttctctgcaacccttaagaaagacacattctttctttagaaagaattcctgctgnaccttacatgccgaagtaaa

SEQ ID NO: 1315 - DNA, 360 bp, Homo sapiens
tctgtgcatccaatttattatagwtttgtaagtaacaatatgtaatcaaacttctaggtgacttgagagtggaacctcctatatcattatttagcaccgtttgtgacagtaaccatttcagtgtattgtttattataccacttatatcaacttatttttcaccagkataawatcttratttytacgacctatcattctgaatcaagmacactgtatgttcagtaggttgaactatgaacactgtcatcaatgttcagttcaaaagcctgaaagtttagatctagaagctggtaaaaatgacaatatcaatcacattaggggaaccattgttgtcttcacttaatccatttagcactattt

SEQ ID NO: 1316 - DNA, 277 bp, Homo sapiens
aaaaaacacgtttgttattaccaaawagagacggctttaggtaaaaataataaaaaccctttgcttgyattacytatgcaratagttstatttatctggwcwacgggytaaaggyacagyactataggwctctggcttgagtmtttacgttcatttcttattgctggaatktcatatttcttcttgttggatgactaaaccggatgatggtagagatggtaagccggcatttactcagccccgccctgctcagcctcgggagcggacgaattctcag

SEQ ID NO: 1317 - DNA, 716 bp, Homo sapiens
aaaatgttctcttgagactagtaggcatagaagaaagcagaaggaaaataaatagaaagaaggtcttctaccttcatggctattcaggctcaggagggtggagagaaaaagaaggaggacaaatgaacaagacagatgagggagacatcctctctgatataagatacagtcctctctggtggatggagtccaatttgtgtaacttcctatgtattttcctagataggaccaccactatttgagaaaatatctcactggtaacctaaagccaaggataataaaccttgatatacttaacattcaatttctttccagcaatgtgataaataaatctatcttgtgtttctcttgcagattgtaaaagcattagaacatttacatagtaagctgtctgtcattcacagaggtaagcatccatgagctgccttggctgttcctttgataaagttcatctctttcacctggagtccgtctctacccccagtcccccatgggtggaagtagaattgactcaggcaagagaactaaggggctttcctttgagattggatagcaaaccatataagtagtattccttatcatggctgaggacataagaagaagacgtgatctttgtcttacatccaaattgaatataaacacttggtagcaagcagagctatgagatcatatcattgagaattttagagaatatgataaaaattgatcttgtctgg

SEQ ID NO: 1318 - DNA, 515 bp, Homo sapiens
aaagctgtatcatgttgagtaaacctgacctgagccagcggtttaaggcgattttgctcgatgaaggtcaagacgtgaacccggtcattgccgacttggtaaggatacagcgcatctgcaaagtaaccgtcggcgaccctcaccagcagatttaccgtttccgtggtgccgaagacgctctcaacagcgattggatggccgatgcagagcgtcactacctgacccagagctttcgcttcggtccagcagtcgcgcatgtggctaacatcatacttttttacaagggtgaaactcgaaagctgcaagggttaggccccaaaacccaggttaaacgtgcgcttcctgaagacctaccgcatcgcacatacatccatcgcacggttaccggcgtcatagagaacgcgcttagcttggtagcgagcaatccaaagatctattgggtaggtggcatcgacagttattcattgcgcgacctggaagacttgtatctgttcagccgcaaccaaaaccaagcc

SEQ ID NO: 1319 - DNA, 141 bp, Homo sapiens
aaatttagtgtctcatttggaaataaactctgggcctattagttgttgagtattttttttttttactacctaaaaaaagatttgttaagagctgaattacaacttagcattacataatataaaacactgtaatgtgtattt

SEQ ID NO: 1320 - DNA, 497 bp, Homo sapiens
aaattcagtcctaagaaagaggagtgcttgtcccctaagggtgtttaatggcaaggcagccctgtctgaaggacacttcctgcctaagggagagtggtatttgcagactagaattctagtgctgctgaagatgaatcaatgggaaatactactcctgtaattcctacctccctgcaaccaactacaaccaagctctctgcatctactcccaagtatggggttcaagagagtaatgggtttcatatttcttatcaccacagtaagttcctactaggcaaaatgagagggcagtgtttcctttttggtacttattactgctaagtatttcccagcacatgaaaccttattttttcccaaagccagaaccagatgagtaaaggagtaagaaccttgcctgaacatccttccttcccacccatcgctgtgtgttagttcccaacatcgaatgtgtacaacttaagttggtcctttacactcaggctttcactatttccttt

SEQ ID NO: 1321 - DNA, 344 bp, Homo sapiens; identical to SEQ ID NO: 1148

SEQ ID NO: 1322 - DNA, 110 bp, Homo sapiens
ccaccacatagccagccaggaatcccttgaggaacggggaggacaacagcgagccaccctggcccactccactgttgacttcgtcttctacacgccgctgcaggctttcc

SEQ ID NO: 1323 - DNA, 359 bp, Homo sapiens
ccacgctgctggcctgggctggcgtctcctgctgtgagctggctgaggaggacttcctggcggtctcccccttagatccgcgctatcgtgaggtccactatgtcctgctggatccttcctgcagtggctcgggtgagatggtgagaaggcgtggctgagggactcagaggtccacagcagcttagacctggagtcatctgttttggtcttagttctgacactttaatgggcttgggaccctggagcaaaagttctcctctgtgaagcgaggatttcaggagcgaggatttcaggactgaggcagcctgtgaagctgtgtaaccgagacacgcttttccttaggtatgccgagcagacag

SEQ ID NO: 1324 - DNA, 258 bp, Homo sapiens
caatcacacaaccacaaaaaagatactgtgtgctctcactttccaaaattctgcctggtctmctcctgaggaaagyagtgatatggtagctggtgtggatcccctaaaggaattataagatggartgygargaacattatcttagactataakactgkctgcatrcrgatatgktstcraagattattcctgctgcraataaagakmttgskaaagagcartatasagctatcacagtctattgacccamasatgttt

SEQ ID NO: 1325 - DNA, 534 bp, Homo sapiens
ctgtccaatggcaacaggaccctcactctattcaatgtcacaagaaatgacacagcaagctacaaatgtgaaacccagaacccagtgagtgccaggcgcagtgattcagtcatcctgaatgtcctctatggcccggatgcccccaccatttcccctctaaacacatcttacagatcaggggaaaatctgaacctctcctgccacgcagcctctaacccacctgcacagtactcttggtttgtcaatgggactttccagcaatccacccaagagctctttatccccaacatcactgtgaataatagtggatcctatacgtgccaagcccataactcagacactggcctcaataggaccacagtcacgacgatcacagtctatgcagagccacccaaacccttcatcaccagcaacaactccaaccccgtggaggatgaggatgctgtagccttaacctgtgaacctgagattcagaacacaacctacctgtggtgggtaaataatcagagcctcccggtcagtcccaggctgcag

SEQ ID NO: 1326 - DNA, 177 bp, Homo sapiens
ctgcattatgtgtgtttagaacgagaagttgtttgtacagtatttttctattgaccgcttccgtcttgcctgaaacctgggcattctttccaatagacagaaaatcagagagtcaaatctgatgcgcaatgagttgttctgagaccagtaatccacggtgctgcaatttgggttttt

SEQ ID NO: 1327 - DNA, 266 bp, Homo sapiens
aaacttgttttatctaatactgagcactgtttttttgtcaagtatttttttaagaccacataattctttttgtctgctcaaggaaaggatagataaataattggcacacatttgtttctcactgaattttacagtagtaaattaatgttataatgtaccacatggagatgagttggtaagaaatcatctagttccagagcccagggattataaacagtaggtgaaatagatttatgacttacgaaatatgttgtgacaatatattt

SEQ ID NO: 1328 - DNA, 409 bp, Homo sapiens
ctgtccaatggcaacaggaccctcactctattcaatgtcacaagaaatgacgcaagagcctatgtatgtggaatccagaactcagtgagtgcaaaccgcagtgacccagtcaccctggatgtcctctatgggccggacacccccatcatttcccccccagactcgtcttacctttcgggagcgaacctcaacctctcctgccactcggcctctaacccatccccgcagtattcttggcgtatcaatgggataccgcagcaacacacacaagttctctttatcgccaaaatcacgccaaataataacgggacctatgcctgttttgtctctaacttggctactggccgcaataatcccatagtcaagagcatcacagtctctgcatctggaacttctcctggtctctcag

SEQ ID NO: 1329 - DNA, 136 bp, Homo sapiens
ccattttcgcacagtccaccataaaattgaaaagattgaccagagacagatcatggagggcttggcaatctgtactgatgaagccatggaccagaagagaagtgagtcaatgaagagagtttctcttttcacatgg

SEQ ID NO: 1330 - DNA, 311 bp, Homo sapiens
ctgctaacagccctaacggtgcaacacaagtacaaactcaggaacctcttcgactgccacgcccttcaccaacagaaggaagacagtggcgccaccacaagtggcagggcacaggggcttctgtgacaacaatatgtccttctagtatacattcattgcaaaggctgccctgaagtttcgtttttggaaataactgttatcatacattttgtatgatgttgcttgtgggcaccatgaagagagcctggctgtaaaggacagagggagctaaaccaacaatgcatggccctgcgtgcccacaagagggagcc

SEQ ID NO: 1331 - DNA, 613 bp, Homo sapiens
ctgggccakgagctgtgcccggtgcctgcagccttcataagcacacacgtccattccctactaaggcccagacctcctggtatctgccccgggctccctcatcccacctccatccggagttgcccaagatgcatgtccagcataggcaggattgctcggtggtgagaaggttaggtccggctcagactgaataagaagagataaaatttgccttaaaacttacctggcagtggctttgctgcacggtctgaaaccacctgttcccaccctcttgaccgaaatttccttgtgacacagagaagggcaaaggtctgagcccagagttgacggagggagtatttcagggttcacttcaggggctcccaaagcgacaagatcgttagggagagaggcccagggtggggactgggaatttaaggagagctgggaacggatcccttaggttcaggaagcttctgtgcaagctgcgaggatggcttgggccgaagggttgctctgcccgccgcgctagctgtgagctgagcaaagccctgggctcacagcaccccaaaagcctgtggcttcagtcctgcgtctgcaccacacaatcaaaaggatcgttttgttttgtttt

SEQ ID NO: 1332 - DNA, 591 bp, Homo sapiens
  misc_feature 10: n = A,T,C or G
ctgagttaanatggtaaagccaatattattttaggaggaaagaggacgaaggccaatgaaccaacatctgcctgctatctggtgcatcacccaaggtgaccaatggctgggcacaaataaacttctcttttgctagccacagagttgctcactgtggcaagcctgagctggtcagaacacctgtgtgtgtgttcctgatacacactaaccacaataagcaagtctgcacacatctctatgagccccatgcaaagacaagacattcccaaagatcagtcactagagtgcaacaacgaaattcaagatttgaccaaaacagaccctgctgcctcctaaattgccaattgcctctcaaaaacttacagaaaaagggacattataagaattcatagagggagagaagaaaaagctgctactcctagtcattagtacaatgtgctgtgttaattagatacctctatataaattagaaaaagtgctttacttgcatgcttcaataaaatgaatactgagtgtcgtagtgttagatctgtacagatataaattttttgcagctatataaaagtgtataagatgggcttttgcatttta

SEQ ID NO: 1333 - DNA, 379 bp, Homo sapiens
ctggtacaaaggcgaaagagtggatggcaacagtctaattgtaggatatgtaataggaactcaacaagctaccccagggcccgcatgcagtggtcgagagacaatataccccaatgcatccctgctgatccagaacgtcacccagaatgacacaggattctataccctacaagtcataaagtcagatcttgtgaatgaagaagcaaccggacagttccatgtatacccggagctgcccaagccctccatctccagcaacaactccaaccccgtggaggacaaggatgctgtggccttcacctgtgaacctgaggctcagaacacaacctacctgtggtgggtaaatggtcagagcctcccagtcagtcccaggctgcag

SEQ ID NO: 1334 - DNA, 384 bp, Homo sapiens; identical to SEQ ID NO: 251

SEQ ID NO: 1335 - DNA, 555 bp, Homo sapiens
aaattagttgctataaattcatcaatactttttttccctattatatttttggttctattaggatttacttaactgaatcttataacaattcgaggtgaactgtggcaatgaaaaccagaaacagttaatgagatgcttcagctcacagtttgaagtgctgagaacctaagtattttgctgtacggtactgagctgtaccaaaatatgatggtttaggtttatgtgcaagactttgtgttgtagtctagacaaaggggtgggcaagagacatgcaaagctgaagccctgcttgaaaagacccttcaaggaagtaaaatggcaggggcagagtgcagcttaacatgttgctatccctgttgtttttgagttggttttggaatggattcaagttcttacacaatttattttgaatacaagcataatctaggtgatttgagttaatgaacttcttttcatgatgtagggaaagctgaatgtatatatttctaagaagaatttgtttagcagattacaagttggcaaaatagactgttcacagaaactaggcaaaaattt

SEQ ID NO: 1336 - DNA, 505 bp, Homo sapiens
cctggaaagaagcccagcaaaaggttccagatgaagaagaaaatgaagagagtgacaacgaaaaggaaactgaaaagagtgactccgtaacagattctggaccaaccttcaactatcttcttgatatgcccctttggtatttaaccaaggaaaagaaagatgaactctgcaggctaagaaatgaaaaagaacaagagctggacacattaaaaagaaagagtccatcagatttgtggaaagaagacttggctacatttattgaagaattggaggctgttgaagccaaggaaaaacaagatgaacaagtcggacttcctgggaaaggggggaaggccaaggggaaaaaaacacaaatggctgaagttttgccttctccgcgtggtcaaagagtcattccacgaataaccatagaaatgaaagcagaggcagaaargaaaaataaaaagaaaattaagaatgaaaatactgaaggaagccctcaagaagatggtgtggaactagaagg

SEQ ID NO: 1337 - DNA, 385 bp, Homo sapiens
ctggtgctagtcagagctaatgacagaatttcagtttaataaaaagacccccaactgagcacaccatcttgaaaaaagtatacttatcaaacagctttcaatcagttcaagagagacaccttaattggggagaggaagaattgcagagtagtttgtaatcatgccaattccagatcaataactgcatgtctgttctttggtagaaatagcttttgctttatattaagtaatcacatatatattctctctatttggataaggaaaccttcgctttatttgacaatgtataatgatatactcttctaattcacctctgtgtcttcacaataaacatgagtaaaatttagacaagtgatggtaaaggtcaatataattatttattttt

SEQ ID NO: 1338 - DNA, 350 bp, Homo sapiens
aaaggtgatattacacaaaacctcgtcttttgttcaactttggatccattggcaattcaatggcctcaatctccccaaactcgccaaagtactccctgatcttttcctcagtggcttcaggattcagacccccaacgaagattttcttcaccgggtccttcttcatagccatggcctttttagggtcaatgacacggccatccagcctgtgctccttctggtctaggaccttctccacactggctgcatctttgaacaggataaacccaaaccctcttgaccgtccagtgttgggatccatttttattgtacagtcaacgacctctccaaatttagtaaaatagtctttt

SEQ ID NO: 1339 - DNA, 443 bp, Homo sapiens
ctgctcctctagtaataagttcctggggataatacattaaccaacattggttgaaacatacctgagtaatcatatcaggatgcatgttaagctgataaaacaataagatcccaaaatgcagtagctcaaaaaaagtagaagttaatttatctcctgggggacagctctggttctcaaattttacaggctcagaatcacctgcagggcttgtgaaagtacagattgctgcgctccgcccccagagtttctgatttagtaggtgttaggctgaaccaagaatttgcctttctaacaagctcccaagtgatgctgatgacttgtaggaatggatttacttctaggattagacttcagctcactctgtttgctgaactctttctaatatttcttaagttggtagactcyctgctccaggttctcaacgtgaaggaaggaacccccag

SEQ ID NO: 1340 - DNA, 273 bp, Homo sapiens
cctcaggaacaggtaggggcagcagaatagaatagcatccatttcccagagaaagactgcctttacatktcccatgcttttagcacaaagcagcgtctgggccactgttaccagaggtgagtttatacatttacaaaatgcttaaaatctttgggaagcaagaggaagctaaacagaaggtcccatgttaactgaaggcaaattcactcaacctctctagtaagggacccatgggcctacagagtgttccctctacaatgtgcagagtggaaa

SEQ ID NO: 1341 - DNA, 561 bp, Homo sapiens
ccatgggcccggtcacgaacaaaacgggcctggacgcctcgcccctggccgcagatacctcctactaccagggggtgtactcccggcccattatgaactcctcttaagaagacgacggcttcaggcccggctaactctggcaccccggatcgaggacaagtgagagagcaagtgggggtcgagactttggggagacggtgttgcagagacgcaagggagaagaaatccataacacccccaccccaacaccgccaagacagcagtcttcytcacccgctgcagccgttccgtcccaaacagagggccacacagataccccacgttctatataaggaggaaaacgggaaagaatataaagttaaaaaaaagcctccggtttccactactgtgtagactcctgcttcttcaagcacctgcagattctgatttttttgttgttgttgttctcctccattgctgttgttgcagggaagtcttacttaaaaaaaaaaaaaaattttgtgagtgactcggtgtaaaaccatgtagttttaacagaaccagagggttgtactattgttt

SEQ ID NO: 1342 - DNA, 159 bp, Homo sapiens
aaagatggcaaggcaataaatgtgttcgtaagtgccaaccgactaattcatcaaaccaacttaatacttcagaccttcaaaactgtggcctgaaagttgtatatgttaagagatgtacttctcagtggcagtattgaactgcctttatctgtaaatttt

SEQ ID NO: 1343 - DNA, 76 bp, Homo sapiens
aaaatgtaaagccaatctatcaccaaaaatggcataaatgtaaacacaagctaattttataatccactgctatttt

SEQ ID NO: 1344 - DNA, 726 bp, Homo sapiens
caaaagcagcctgaatacgcaactcacgccaagagggcagcagctctcctgacatccatgtaagaaggctaacacctaaaccacacgcaggcatcctgaactcagcagctctgatccaaggtactgagtggagacaaagcactcggaggtggcaagatgttcagcaaccaagtaagacacactggcaaggcatcccacccaaaggtgagaagcacaaagcaggcttggagaaacaaacagtcatgccaggtgcagccagacatcctgctataagccctgaccctagtaccccgagttcatcaagtgctctggttttgtgtccataaagcacagagggcactgaccaccccaaaccagaatcccaaggaatccttatggatggcatagggcctcagaactgctgcaggatcattttccttttcaggtcgtggctgaacttgttcatcctgaagagctcactgtcataaaatgcagagaggttgtggatgttgatctgacgagccttatccaccaagtccttmtcagggacctcaatagtgtcctgctgggccccaaagcggttgcgctgatatgtcacstgctctgccactaactgcttcagtatgaagagcaacagctcattgttgtcacgccggaatgaaaggtagcgggcaaaagtcttgcgcatgctgcgcatgacgctgaacttctgtgtgtctatgaagstctccakmatcaygagratgg

SEQ ID NO: 1345 - DNA, 742 bp, Homo sapiens
ccagagagccctgtcctgtgagggtggttatcacagtggcagggttcaattcagaagaccttgagggcaggctgatgtttcctgaatgggcccctggttgttgcttgtccctgactctccatttccccatctgagtggatttggacctaatagggcactggagctggttcgaatcctgactggactacttggcaactttatgtctgggagcaagttacttaacctccccaagcctgtgtctgtgaaatgcgggtaaatgaatgtagatgtttggcagcagctactccttgttgagctctcacagtgaactctcctgcctctgccctccttccccgcctcccctggtgcctagcgtcaggtctagccacttcctcctgggcccctctcccttttctgtggctggctgcctgcccgcctggcgctggacctttcatgtaacgggaatcagcatgtatattctggtctggtctgtttctacacttaattttgtttccagtagtatttccctgtaccggcagagttcacaaacacatttgaagaggctttttctcaggattcttaaccttccaaaggaagtcccatggatgggtttctagaagtctataaatgctctgaaattgtatttttctgtggaaaagcataacttttatctgcttggtcgtgctcaaaaaaagatcatgaatggaatgaattgcattgaattttatgccattgggggcttaatactaaaaggatatggaag

SEQ ID NO: 1346 - DNA, 573 bp, Homo sapiens
  misc_feature 498, 543: n = A,T,C or G
aaatgcattkttaacttacagtattttcaacttacgatgtgtttatcasgaagtaaccccatcataagcagaggagcatctgtattgcgtaatttgactggcacagtttattaggttctgttcagtgwtttccgtcaacaagatgtttattgtgtgagtaaacaagttaagccctgtgacaagctgaataagaatagtctctcctcagcagcttatagtaaacaagggtagtaatccttacattagtggctagactatcaaacgaaatatataacatgtaagaacactaaagacagaattactgtggcatagagatagttagaattgcttcagcctaagagatgaattaggtaatgcaaggaggtgaatatgttggcctgcaatatgaacaaggcagagagctgggagagtaagatgtaagttgctaaggagggatgtgtcttgagtttggaaaccataaagggaaatcataggtaatgctagagtcactgatcttanggagccttgaataacggtgatgactaagggaatctttattttggngggactattggaattaaattggccagaatt

SEQ ID NO: 1347 - DNA, 333 bp, Homo sapiens
cctggtttctggtggcctctatgaatcccatgtagggtgcagaccgtactccatccctccctgtgagcaccacgtcaacggctcccggcccccatgcacgggggagggagatacccccaagtgtagcaagatctgtgagcctggctacagcccgacctacaaacaggacaagcactacggatacaattcctacagcgtctccaatagcgagaaggacatcatggccgagatctacaaaaacggccccgtggagggagctttctctgtgtattcggacttcctgctctacaagtcaggagtgtaccaacacgtcaccggagagatgatgggtgg

SEQ ID NO: 1348 - DNA, 185 bp, Homo sapiens
aaaaaagcttgcagcaagaaaatgccagtgtgcaactgggtgactaaagaccaaagaaaaacagttaaaagggacagcttacttgctctctgtctcaggtttaacttctcacctgaaatctctcatagccctaattaaacacaaacaaaagtctcttccatagataggctacttctcagcttcag

SEQ ID NO: 1349 - DNA, 171 bp, Homo sapiens
gcggcagcgaggggctcggagaggtgctcggattctcgtagctgtgccgggacttaaccaccaccatgtcgagcaaaagaacaaagaccaagaccaagaagcgccctcagcgtgcaacatccaatgtgtttgctatgtttgaccagtcacagattcaggagttcaaagagg

SEQ ID NO: 1350 - DNA, 400 bp, Homo sapiens
ttgtcatatcatatctatgtcacctgtgtattctgagattacacacatacctgccaatatacctgggaaaggttattttatcacagttacacttgagttcttggcaggcaggactgaggaagagtaatttgaaagaagttttacatcctatttagaagaaatcactagtatttccttaaataacaggttacaatagaaagatactgcctggaagttatcctttcactttggttcatttttagtttttctttatgatttacatagctgtttaattcatttgcttatagtacaatcctgccataaagtattaaagcacaagatacctattattccttcaacatctgcatttttcaagttttatactctacatccacagtacgtcagcagttcttgaatgttt

SEQ ID NO: 1351 - DNA, 309 bp, Homo sapiens
ccaggaaagggcagtcctgagggagaagacaggattcagggcagtgctccgaagctgtgtgctcacctggttggctcatcaaacctggcaaccctgtggcctgtctgccggagctgactggatccactcatcaattcttcgtccccactactaagactgggcatgttttgctggtgtggtctctgcacttcaggaatggtcacaacagggggtagccctcaaaagcactcctttttctatacctcttctcaaggccatgtaagttgcccatctctacctggctgtggacaaaaggttatctgctcttgg

SEQ ID NO: 1352 - DNA, 268 bp, Homo sapiens
ccacttcatctgtgtgggaacgtggtcaggccgggtgctggtgtttgacatcccagcaaagggtcccaacattgtactgagcgaggagctggctgggcaccagatgccaatcacagacattgccaccgagcctgcccagggacaggattgtgtggctgacatggtgacggcagatgactcaggcttgctgtgtgtctggcggtcagggccagaattcacattattgacccgcattccaggatttggagttccgtgcccctctgtgcag

SEQ ID NO: 1353 - DNA, 620 bp, Homo sapiens
  misc_feature 545: n = A,T,C or G
cctgagtaattattccatcatagacaaacttgtgaatatagtggatgaccttgtggagtgcgtgaaagaaaactcatctaaggatctaaaaaaatcattcaagagcccagagcccaggctctttactcctgaagaattctttagaatttttaatagatccattgatgccttcaaggactttgtagtggcatctgaaactagtgattgtgtggtttcttcaacattaagtcctgagaaagattccagagtcagtgtcacaaaaccatttatgttaccccctgttgcagccagctcccttaggaatgacagcagtagcagtaataggaaggccaaaaatctccctggagactccagcctacactgggcagccatggcattgccagcattgttttctcttataattggctttgcttttggagccttatactggaagaagagacagccaagtcttacaagggcagttgaaaatatacaaattaatgaagaggataatgagataagtatgttgcaagagaaagagagagagtttcaagaagtgtaattgnggcttgtatcaacactgttactttcgtacattggctgggaacagtcatgtttgctttcataaatgaagcagcttt

SEQ ID NO: 1354 - DNA, 398 bp, Homo sapiens
aaaggattatttttatgcaaagtattctgtttcagcaagtgcaaattttattctaagtttcagagctctatatttaatttaggtcaaatgctttccaaaaagtaatctaataaatccattctagaaaaatatatctaaagtattgctttagaatagttgttccactttctgctgcagtattgctttgccatcttctgctctcagcaaagctgatagtctatgtcaattaaataccctatgttatgtaaatagttattttatcctgtggtgcatgtttgggcaaatatatatatagcctgataaacaacttctattaaatcaaatatgtaccacagtgtatgtgtcttttgcaagcttccaacagggatgtatcctgtatcattcattaaacatagttt

SEQ ID NO: 1355 - DNA, 371 bp, Homo sapiens
ctggytcctcagtgggaactgagtcattacctgctaaagggtagaagaggagagagagaggccagagcctggggatggggcagaaggtgcagcaggaaggaaggttagagtgagaaaaatttccaaataaggggtgatgtgtgagtgctcagagggtgactgaggacatctccagcatttccattgaggagggaggaaggaggggcccttgggttctggggcagatgccggcagggtctggatgagatgcccccaacctcaaccctggtcctctgaaaacacttcacccagtcacactgaggagcccctccaggcccaggggcccctccaggtaggcgtatctcagctcctctctggaaggacccccacag

SEQ ID NO: 1356 - DNA, 338 bp, Homo sapiens
gcggcgcgggcggcggtaaaatgtcggttccaggaccttaccaggcggccactgggccttcctcagcaccatccgcacctccatcctatgaagagacagtggctgttaacagttattaccccacacctccagctcccatgcctgggccaactacggggcttgtgacggggcctgatgggaagggcatgaatcctccttcgtattatacccagccagcgcccatccccaataacaatccaattaccgtgcagacggtctacgtgcagcaccccatcacctttttggaccgccctatccaaatgtgttgtccttcctgcaacaagatgatcgtgagtcag

SEQ ID NO: 1357 - DNA, 159 bp, Homo sapiens
ctgggctgctgcctctggagtacttccccgcagctcctcattgctcacatagtaggcaatggcgttgctctcaaacacacagaatccatcatcaccctcaaatgctgggaccttgccggcaggaaatttgcggagaaattcaggggtgcggttggtttg

SEQ ID NO: 1358 - DNA, 306 bp, Homo sapiens
cctgtcagagtggcactggtagaagttccaggaaccctgaactgtaagggttcttcatcagtgccaacaggatgacatgaaatgatgtactcagaagtgtcctggaatggggcccatgagatggttgtctgagagagagcttcttgtcctgtctttttccttccaatcaggggctcgctcttctgattattcttcagggcaatgacataaattgtatattcggttcccggttccaggccagtaatagtagcctctgtgacaccagggcggggccgagggaccacttctctgggaggagacccaggc

SEQ ID NO: 1359 - DNA, 382 bp, Homo sapiens
agagggagtccagcccccaagccttgtgaggcactgttargcagatagggaaaagaggggtccttagatcactggttcaaggagggatctggtaggggcagcatttcttctgggctggaaacagaatgggggtttcaagatggcagaaccattccattattggagctataagcccctagaattgctccatggcctatctcggtttcccttggatctcatctgctcctgaactgcacctgtcatggcaagtccatctccggcccccatctcccctgagccaatgtgagtcaggtgaacaaaattcattggttccccaatcatggtccggtcaatccgtcttctcttcttctttcttctccaccatccagacgttcagctacag

SEQ ID NO: 1360 - DNA, 365 bp, Homo sapiens
aaaaaacctttcaaaataaaacttagtaaaatctagaactgkttcttggcctacttgagaggaacttccatattttcacagccatctccgaaagcagcagttgctgtaaattaactgagacttggaaatggtgcagactgtcttggtagagctgttcttatagcacaattttatctggaaaataaacttgtaaatgcgtgctgtatattaatacatgtgtgcccatatttatttttattatctcctgccagtctttgctcaatgggagatgacagaccaacttctcaacgtgatttccccatttcattgaatgacatttatatgccacttatgaaaaaaatactgctgtgaaagaaatgtacttt

SEQ ID NO: 1361 - DNA, 502 bp, Homo sapiens
gaggtatggaaaaatatcaacaaggaaatattagatttgaactgctgcttcgttagcacacagcacattctccaggatataccatatgttaggacacaaaacgggtctcaataaatttttaaaagtcaaaatcttatcaagtatcttctcagaccacaatggaataaaactggaaatcaataacaagaggaacttctgaaattgaacagatacacggaaatcaaactacatgttcctgaatgaccactgtgtctatgaagaaattgattttaaaaatttaaaaattctttgaaacaaatgaaaatagaaacacagcatacaaaaatgtatagggtacaacaaaagaagtgctatgagggacatttatttcaataaacacccacatcaataaggtagaaagtttttaaacaaataacctaataaacgcatctcaaggaactagaaaagcaagaacaaatcaaacctaaaattagaaggaaataaatagtaaagatcagagcag

SEQ ID NO: 1362 - DNA, 545 bp, Homo sapiens
ctgattggatgtctaggaatgactgaaagaaaccaaaacagcctgtccactgctgctgtgggatggaggaggcgtaagcagaaacactaacagtatactgacctcttagcagaaccgcttccattctggagatcacggctgctaaatccagcatccccacttcattttacccccagcatattgttctgtagtcttttcttgaaacatcttgattgcttttcctcggcagctttcaaaaaaccaaataataatagttatccgtcttctacttcatggaagattgttttggtgccctgaccctctgaagtgcccagttcctgccatctgaaacctcggcctgatctgatctcatgttggaatctgcctgtctttcacacagggctggtcttggtcctttacatgccagttttgcttgtgaattcttgcttttttcctctcatcagccttaagtttaggcgtttgttgttctccagtgatgtagacagttcccttcacaagtcacagttcttcccataaatgaggcccgctgacctctgcgggacttt

SEQ ID NO: 1363 - DNA, 286 bp, Homo sapiens
gggagatgcaggatgtagacctcgctgaggtgaagcctttggtggagaaaggggagaccatcaccggcctcctgcaagagtttgatgtccaggagcaggacatcgagactttacatggctctgttcacgtcacgctgtgtgggactcccaagggaaaccggcctgtcatcctcacctaccatgacatcggcatgaaccacaaaacctgctacaaccccctcttcaactacgaggacatgcaggagatcacccagcactttgccgtctgccacgtggacgcccctgg

SEQ ID NO: 1364 - DNA, 503 bp, Homo sapiens
ccatcaggatcatgaaaacaaactttggtgaatgtgagcaactgcgccagacaggacacaggttacagggcctgacgtcactaacggtaactgacaatcttggaatggaccctactgctgatgtttcaaaaggacacagaggtgaactggtcacttctaattaagaagagccagtggggtgggggaagctgaaaaccaaaaatccacgtagacatacgtggcagtgtgaacgtctgtcctccccttccttctcctcacttcctctcctcctcctcactcaggctggtattctcctggtgtgcggatgtcagcttgccctgcagaagggctgccagttttttagatgtctttttgagaaacgagctgcccggatgggcactgttcacgtgcaggtacaggtcctcctgggtggggcccgtgtagccgcaatcctcgcagacgtagagcttgtcccgccgctgcttataggcatactgctgctgcaccccatggattttcttcag

SEQ ID NO: 1365 - DNA, 245 bp, Homo sapiens
ctgggcggctccacgctcatccagtgggcctaggttctgactgaccagcgaacaaaaactgtgacagagatctaggatttcattcaggcagtgaaacacctacccgggaaacagagttggcattaggaaaggaaggaaggtacatccatgaagttaaagtgttaggagaacagtctgattaatagctgatctaattaatagctgacctcccaaatctgacaggatagacactgccacgtgcaagg

SEQ ID NO: 1366 - DNA, 131 bp, Homo sapiens
aaaatccccataaatcttttctgtcctgaggtagttgcaaaataaatcataacttggatatcaactagagctgaggctttgactttttactcattaaaactagttgttacaggaactacctttagatattt

SEQ ID NO: 1367 - DNA, 430 bp, Homo sapiens
ctgtgcagttatatgaccataaaggaaatgaaccattaaaaatggatctacagccatatattctgccgttactcagaggcttaatgatttattttccccctccagccctgcctttaccaggttaaatgacagaagaccttctattgtacctattgttcaaaaaatattactgttctgtggaacctgggagagtccaattgataagagaaactgaatcatactgatgaggtgaaggataggtctgccggtgtggggcagggcactctttctcagcagccaagataacttatcacacacgaagcagagagaatgcacccgatgaaaatctctctgaactgtgttccttgaaggatctcttaaaaaaaaaaaatctgaaacatcatccattgaacaaatgaaaggcttatacctttaccatgaagaaacattt

SEQ ID NO: 1368 - DNA, 294 bp, Homo sapiens
ctgggcggatagcaccgggcatattttggaatggatgaggtctggcaccctgagcagtccagcgaggacttggtcttagttgagcaatttggctaggaggatagtatgcagcacggttctgagtctgtgggatagctgccatgaagtaacctgaaggaggtgctggctggtaggggttgattacagggttgggaacagctcgtacacttgccattctctgcatatactggttagtgaggtgagcctggcgctcttctttgcgctgagctaaagctacatacaatggctttgtgg

SEQ ID NO: 1369 - DNA, 429 bp, Homo sapiens
ctgaaggcaatgggggactgaggaaggaggcagcagaagtaggagaggagcaagaatccagaagggaaatgagaacgacaaaactgaagtgcacttcaacatcctgcagccaaaggggtaaaaaggagaaagaagtgcagaccagtcacataaatgccacagtgacatgcacaaaaacgtgaggggcacactccagggacagagtctgacaacatgacaagctacatggcatcaaactctttcatgtgacaggcagcttttcacatgtgcatcttaagactggaacttgctatagataaaccttaagtagttaataaaagcaaaagtcatcctctattcactgtttgctgccatgttccaggcatagtacttggcactttttattttatttcacttgatcagctcagaaagtcctccaaatgagtattt

SEQ ID NO: 1370 - DNA, 540 bp, Homo sapiens
ccactcccaggatgctgggtctcgcttgctggctgggaccccggagccgtcagtccacgcactcccggatgcactcaacaacctaaggacgcaggagggttccggggatggtccgagctcgtccgtagattggaatcgccctgaagatgtagaccctcaagggatttatgtcatatctgctccttccatctacgctcgggaggtagcgacgccccttttccccccgctacacactgggcgcgctgggcagaggcagcacctgctttttccctacccttcctcgattctgtccgtgaaatgaattgggtagagtctctggaaggttttaagcccattttcagttctaacttactttcatcctattttgcatccctcttatcgttttgagctacctgccatcttctctttgaaaaacctatgggcttgaggaggtcacgatgccgactccgccagagcttttccactgattgtactcagcggggaggcaggggaggcagaggggcagcctctctaatgcttcctactcattttgtttctagg

SEQ ID NO: 1371 - DNA, 142 bp, Homo sapiens
ttaaaatggtagcacaagagtctggcaagttggtactgcagagaaaaggggttaattgaggcttgtttggagtcgggattcccctttcccaaacatgcgtctcgccacttggacagcagccatttgtactcgtatacttttt

SEQ ID NO: 1372 - DNA, 377 bp, Homo sapiens
ccaccatctgtgcaagtagccaaaaccactccttttaacacgagggagcctgtgatgctggcctgctatgtgtggggcttctatccagcagaagtgactatcacgtggaggaagaacgggaagcttgtcatgcctcacagcagtgcgcacaagactgcccagcccaatggagactggacataccagaccctctcccatttagccttaaccccctcttacggggacacttacacctgtgtggtagagcacattggggctcctgagcccatccttcgggactggacacctgggctgtcccccatgcagaccctgaaggtttctgtgtctgcagtgactctgggcctgggcctcatcatcttctctcttggtgtgatcag

SEQ ID NO: 1373 - DNA, 504 bp, Homo sapiens
ccatgctaagtttgggaaccgctggtgatgggacatggatgcttgcaaccgaccgtgggcggatgtggttgaccagatggcagaggacgacaccatccatgagggctgcccccaggtcttcgtgcagactgaccttcaatctcatctcaatgctctcacgaagttgttccaccagctctttctcttctctcatctgctccattttcctccggattgtaaactgcgggtctatagattccaaatttctctgaggtcttagaaacacagactcagaaatcaaatgaggatgtctcagaaaggagtcacttttccagaggcaggctgccccttaactcagccgagcagcaggaaccactggggccaaagctattttatcttccttaggtaaaaaaaaatcaatagaatatttcttccccgcttacatgctcccaccactgatgaacgcgatcttcagcaagaagaactttgagtccctctccgaagccttcagcgtggcctctgcag

SEQ ID NO: 1374 - DNA, 201 bp, Homo sapiens
cctccgtaagatgcttgacaattttgactgttttggagacaaactgtcagatgagtccatcttcagtgcttttttgtcagttgtgggcaagctgcgacgtggggccaagcctgagggcaaggctataatagatgaatttgagcagaagcttcgggcctgtcataccagaggtttggatggaatcaaggagcttgagattgg

SEQ ID NO: 1375 - DNA, 295 bp, Homo sapiens
  misc_feature 12: n = A,T,C or G
ctgtgaggctgnttccaaggaggaaaacaaggaaaaaaatcgatatgtaaacatcttgccttatgaccactctagagtccacctgacaccggttgaaggggttccagattctgattacatcaatgcttcattcatcaacggctaccaagaaaagaacaaattcattgctgcacaaggaccaaaagaagaaacggtgaatgatttctggcggatgatctgggaacaaaacacagccaccatcgtcatggttaccaacctgaaggagagaaaggagtgcaagtgcgcccagtactgg

SEQ ID NO: 1376 - DNA, 318 bp, Homo sapiens
ccagcgctactgtactggcccagggcagagttcatgtatctcgtcttgaccacgtctacaggggaggcgatgacagtggtgcagaagcctgccccaaaggcagaagtgaagtggcaagggaggtcatctgtcatgaggttggctttcaggagggcatccttgatgaggtcataggtcaccagctcagcacagttgacaatggcattacgagcaacattgggggaggtccctttccagaggccccggaacccttcctctcgggcaatggtcttgtaggcattgacggtgctttggtatctccgaccacctccagcccgg

SEQ ID NO: 1377 - DNA, 143 bp, Homo sapiens
gtggattccgytccgggcaccgatctcgccaagatcctgagtgacatgcgaagccaatatgaggtcatggccgagcagaaccggaaggatgctgaagcctggttcaccagccggactgaagaattgaaccgggaggtcgctgg

SEQ ID NO: 1378 - DNA, 98 bp, Homo sapiens
aaatattggtaataggtcggcaacagcaactatagaagtacaactcaatagatggcattaaaacatattgtagtgtggatatatattttttctttttt

SEQ ID NO: 1379 - DNA, 330 bp, Homo sapiens
aaagatgttcacgttacgctggaccaaattaagacggctttctccctcttgctgacgtgccccagccgtgataatgaccagcttggagtttgcagttacattatagtctttgccagagacaatctttggtgttctaaggaaaaggctgccatgttggagatccatcatctctcccttcaatttgtcttcgacgacatcaacaagagcaagttcatctgccaagtccttcattaagatactgatggcacaggccatgccaacagcaccaaccccaacaactgtaatcttattctggggggtctgttcttcctttagaagattataaatcag

SEQ ID NO: 1380 - DNA, 269 bp, Homo sapiens
ccactcctggaaacccactgatagatgagtttcccccattcttctggcctccgccacatgatcaggaagctggacttgctcttatccaaccactcgaggttccctttcttcctcagttcctctaatacaatctggatcgactccacaggaagctttcgctgtagcttgacgttgttgaagagcgggctctcctgagcttccatcaccgtcatgctggactgtttgtgcaggcggcagaaggacaggaccagcgagcaccaggcggccag

SEQ ID NO: 1381 - DNA, 232 bp, Homo sapiens
aaaagagaggaaaggcagtgcagggctggaggtcctggagggtggcggcgggtcgtcctaactagcaggctgaaaggtgctggaggggatgccttcactcagaggaagttcacagccacctgccttggaacatgtacctgttcatcttttcgtaatgttagtattcattttgctatcttcctgttgccatttccaaacagtgtcagtatgtttttgttaaatacgaacattt

SEQ ID NO: 1382 - DNA, 348 bp, Homo sapiens
aaacgtgctaaagggaaaggaatctgacattctgggtaaatcttactcaatctaaatcaaagcttggttttcaggaggaggaaggtgcgagcgcaggcagaggtgctgaatactcctcttctgattcacttccatcatcctctttctcttggtcactgccctcagtgctaagccggtcaaacccttttcgactgtagcccttacggcttgcaaagaaattaccaaggtttaagcctccacttccctttcctctaaatcttcccagtactcttcctgaactcgtctcgagtttgtgttcagaatctccaaaggcccttgattttttccaccgaataaatatggcaatgg

SEQ ID NO: 1383 - DNA, 293 bp, Homo sapiens
  misc_feature 10: n = A,T,C or G
ctgcttcaanacctcagcttcatgggacttgcgtctttcttctgcagcttctaatttcttctgaatttcctccagggaaagatccttcttctttggaggggaaagggggaattctggaacagattcttttgaccgagggctgagaatcagctcaaaagcctggcccgaggcacgcttctccagttctttcacctggatatcagaagaagccatggtgaatagaagacaagcgacaggcagtgtattctgcacaatcaactgggataaggaaagtcctgctcagtccgagccgc

SEQ ID NO: 1384 - DNA, 573 bp, Homo sapiens
ctgaagcaacttgggattaattgcttgattagcttcacgaagcacagagataaggtcgctcacttgctttatgttattaggtgtaaagaaagtgtatgctgtgcctgttttggtactgcgagcagttcttccaattcgatgaatataatcctctgaggagttagggtagtcataattgatgacaaatttcacatcttccacatctagccctctggaggccacatctgtagcaatcagaataggagcttttccatgtttgaattcatttagaacccagtcacgctcttgttgactcttgtcaccatggatacccatggcaggccacccatctctcctcatttttctggtaagctcatcacatcttcttttggtttccacaaaaacaatggttttattctccttctcactcatgatctcttccattagacgaataagtttttcatccttttctacgtcatgacacacatccacaatctgaagaatgttgtggtttgcactcagttcaagtgcaccaatgtttatatgaatatagtctttcaggaaatcttcagcaagctgtcttacttcttttgg

SEQ ID NO: 1385 - DNA, 150 bp, Homo sapiens
ccaaggccgctagggtccttacccctcaggatcactccccagccctttcctcaggaggtaccgctctccaaggtgtgctagcagtgggccctgcccaacttcaggcagaacagggaggcccagagattacagatcccctcctgtaagtgg

SEQ ID NO: 1386 - DNA, 159 bp, Homo sapiens
  misc_feature 139: n = A,T,C or G
aaatgatgttttggttaagagtggaccatgagaattagctgacagcatcccctttctctctccctgccttggtgggaccctccctgtgtgaccttggtcaagtcctcgaacttttgtcccgtatttaagatggagctgntttacctacttcataagaca

SEQ ID NO: 1387 - DNA, 735 bp, Homo sapiens
  misc_feature 5, 20, 41: n = A,T,C or G
ggtgnaattcgcctttgaanggccgccgggcaggtcctttntgtstgctgaaggcagatcgcttgttccacaccagctaccactcccaggcagtgcatatccgccctgtttgcagaaatgcacgctgtactagcatctcctgggagctgaggcagaccctgtcagttgtatttgatgccttcatcacggggcagggaaagaaagactggtccctcttccggatgttctcccgaaccctcacggagccctgccccctggcttcagagagccgagtctatgtggacatcaccacctacaaccaggacaacgagacattagaggtgcacccacccccgaccactacatatcaggacgtcatcctaggcactcggaagacctatgccatctatgacttgcttgacaccgccatgatcaacaactctcgaaacctcaacatccagctcaagtggaagagacccccagagaatgaggcccccccagtgccctttctgcatgcccagcggtacgtgagtggctatgggctgcagaagggggagctgagcacactgctgtacaacacccacccataccgggccttcccggtgctgctgctggacaccgtaccctggtatctgcggctgtatgtgcacaccctcaccatcacctccaagggcaaggagaacaaaccaagttacatccactaccagcctgcccaggaccggctgcaaccccacctcctggagatgctgattcaga

SEQ ID NO: 1388 - DNA, 369 bp, Homo sapiens
ctggggacagcctacaggggcctccagcctgtgccagacgaggaggtgattgagctgtatgggggtacccagcacatcccactataccagatgagtggcttctatggcaagggtccctccattaagcagttcatggacatcttctcgctaccggagatggctctgctgtcctgtgtggtggactactttctgggccacagcctggagtttgaccaagcacatctctacaaggacgtgacggacgccatccgagacgtgcatgtgaagggcctcatgtaccagtggatcgagcaggacatggagaagtacatcctgagaggggatgagacgtttgctgtcctgagccgcctggtggcccatgggaaacag

SEQ ID NO: 1389 - DNA, 322 bp, Homo sapiens
aaagatgtttctggcattttctttttatttgtaaggtggtggtaactatggttattggctagaaatcctgagttttcaactgtatatatctatagtttgtaaaaagaacaaaacaaccgagacaaacccttgatgctccttgctcggcgttgaggctgtggggaagatgccttttgggagaggctgtagctcagggcgtgcactgtgaggctggacctgttgactctgcagggggcatccatttagcttcaggttgtcttgtttctgtatatagtgacatagcattctgccgccatcttagctgtggacaaaggggggtcag

SEQ ID NO: 1390 - DNA, 450 bp, Homo sapiens
aaatattagwtgagactttacaggcacataactgttcagatagaaacaaacataacagactaaaatactttcaaaattaaagccatctagaaaatggaagtaactgaaactgtagccattacaattctttttctggttttgagcaaaaattttatctctctggcaaaacacctttgtctgatcatttgagagacagggttcttgtatactgtttcttcaacgtaaacctcatttacaaaaatagtgacatagcattatgaataaactatgaattggggaccatggaaatgcactagaacaaattttgtaaaaatatggcagatatggaagttaaaaatagaatggatgcaaggactgtactaaaggtgtttggtgtagttacaatgttcactttgcacaactatccctatagtctaggtagccattgggtttctcctcagcagtgtcaga

SEQ ID NO: 1391 - DNA, 304 bp, Homo sapiens
aaaaaatcataaatggggtttcataatccaaagttgaaacatttattcttcatagcttcagaatttaacaaccaattgtagaccatgctttccaaatccagtcttctttgctatttttcaaaacttctgagatctagtattaaactgctccattctaaatgtatagttttagataagtattgtacacttgttgataagggttttctgaaagcagtctatcaaatataaagaatggtttctatctaagaatcagcagtgagggaagaaatattaaacacctatcaagaaatcaattattcatttt

SEQ ID NO: 1392 - DNA, 140 bp, Homo sapiens
ctggaagaagaactgagacagcagaaagaagcagcttgtttcaaggctcgtccaaacaccgtcatctctcaggagccctttgttcccaagaaagagaagaaatcagttgctgagggcctttctggttctctagttcagga

SEQ ID NO: 1393 - DNA, 166 bp, Homo sapiens
aaaactttgtttttcttaaaagcttacagtgtttggctaattctcctcccctttttacaagacgggggccggagggtggacactggtggcaggttaagggatactgtcactttaagaagcctgcagattgaagtgtaaacatggagaaattaggggctgatttttt

SEQ ID NO: 1394 - DNA, 543 bp, Homo sapiens
gcagaggctgtggtacaacatggtccttggtgaagacctgcacccctggaacctcccaccatcatcacaactgtagtctcatttgcagtggagaaaagaacccgacgtcccacagccagatatacacccagctccatgccagcccttcatgtttaccttttgctttgttaattacatgtcagactcctagagggcctccagactaataggaagcatttctgtaaccaacctgccacccactgattcagaaatggaaatcacattccacaatctatggcttctaccagctagcccaggaaatacttgaaatcagcattccaattagtgttgagtctcttgattgtgtcatttaccaattaaataactgagacctaagtctgggaacagagccacgaatctgcctttgagatgctggcagatctcaaggccatcaattattgggggagggagggacaaacactcccaatcatccaccagtcagactgaatgtgtagctggcgaggaattacttccacttctggcccagcacaagccctgctttgg

SEQ ID NO: 1395 - DNA, 364 bp, Homo sapiens
cctatcatcagtggggttgtattcaccatcatccagggtaccatcttcatacaaggtactagctatgaccaaccgaaacttgtcacccaagtctacagggtaaatttgaatgtttacatctaagattagatccatcttgaaagattcactctcacaatgcagtcgagacactcggtcaaacttcttgccctccgggtcaatatccttcacatcgaaaatatcctcaaacaggatgcccgccatcgcgagggggccacgagagcagcagaaggggtgagagcgcgaccacagttgggagtacgtgcaccccctagcgtggacaagaccggagagaaccaaaagcacctcctgaaagcgcggcggc

SEQ ID NO: 1396 - DNA, 422 bp, Homo sapiens
gctgctgctgctattgtgtggatgccgcgcgtgtcttctcttctttccagagatggctaacaggggcccgagctatggcttaagccgagaggtgcaggagaagatcgagcagaagtatgatgcggacctggagaacaagctggtggactggatcatcctgcagtgcgccgaggacatagagcacccgccccccggcagggcccattttcagaaatggttaatggacgggacggtcctgtgcaagctgataaatagtttatacccaccaggacaagagcccatacccaagatctcagagtcaaagatggcttttaagcagatggagcaaatctcccagttcctaaaagctgcggagacctatggtgtcagaaccaccgacatctttcagacggtggatctatgggaagggaaggacatggcag

SEQ ID NO: 1397 - DNA, 653 bp, Homo sapiens
ctgacctgctatcccaccccaaatttcagcctgaggtatatttcagtgaaggcaggtagctgtgcttctcagagcagagaagcagttttaagagcaaaaaggtagaggaaatctagaaaagaaccgtcttgatacagatttatcccatggtgtgaagggagggcaaagaacccagtggcacttcgcttatccagcaatttctgtcactgtggtgaccaacttctgcccgttccatagggtcttgaactgctcaggaactgggaattcattaaagtcaccgccttctgtaggaatgaggacattcatctcggaagatttggcactgactatttcacaatccagggaattcttgctcaggtaagcatggcagccatctgttttgttgatggatatggttggcactttacccattacctgaactttgacatccttactgttgattatctccacaatgcccaccacgtcatcgaataccaggccaagtttcttacagttatctactgtaatggagttaattttgcccttgatttgcaatgtcgtgttgacacacttgtatatgtaagccacctgtttcagctctgtgtcctcaatcaccagggtggaaacattttcctgattttccctctcccttcttgccttcagttcaagtacag

SEQ ID NO: 1398 - DNA, 261 bp, Homo sapiens
aaaattataactactcattctttctttagccttagataatttgagcagaagccacaacaagcaaaccacaataaatttagaattggcagaaatccacattaactcctcttcccaagtttccacactactaccatttacagttgtaggtttgtaatgtataattatgtaatgcasaaactagctttgacttgtgtracgatgcactgtcaaaggaagcaaagtaagaattgaaattccacattcccagaatttaacactcag

SEQ ID NO: 1399 - DNA, 195 bp, Homo sapiens
ctgattttatttccttctcaaaaaaagttatttacagaaggtatatatcaacaatctgacaggcagtgaacttgacatgattagctggcatgattttttcttttttttcccccaaacattgtttttgtggccttgaattttaagacaaatattctacacggcatattgcacaggatggatggcaaaaaaaagttt

SEQ ID NO: 1400 - DNA, 120 bp, Homo sapiens
ctgcctccaaccctttgggtctccaccacccaagtttcctgtagggtccgccgggtccaggatcacaggcctgggtttcgtgagctgccttctcaggtacttttcaataatggggttttt

SEQ ID NO: 1401 - DNA, 284 bp, Homo sapiens
ctgtagccaaaaagatgctggggcagattgtggacaagtagaagcacctccttcccctctgcgacattgaacggcgtggattcaatagtgagcttggcagtggtgggcgggttccagaaggttagaagtgaggctgtgagcaggagcctctgccaggggacatgcaatctgcagggaggggctgaggggggtcccatggtctctgctgtcttctctgtccacctctttgtagaggagcttgagctccaggaatgctctggtcagggctgctgtgactgttggcc

SEQ ID NO: 1402 - DNA, 198 bp, Homo sapiens
ccaggtttctgctggtaccaggctaagtagctggtgctggcgggaacactgtgactggccctgcaggagagggtggctctttcccccggagacagagacagcgtgtctggagactgtgtcacttcaagctctgcgatgccatctgggagccagagtagcaggaggaagagaagctgcgctggggtttccatggttccc

SEQ ID NO: 1403 - DNA, 441 bp, Homo sapiens
aaactcaaaattgacaaattaactagcttgctttttgtcatttggaagactaccattattcaaatttattatgtaatacactcatccagataatgaaacatctgcgaaaaaaagtgtgggaatcacctcatctgtgcataaaatggctattatacatgaatgcagacgtttgaagttagaaaggaatataactcaaatagcaaaaggtcctaattacagagtttacaaataagcagttttattttcaaaagtacatagtaagtccagactgggctattgccaaagaactaatctttagtctacttcaacatgttacatggtattcctgactctacagactatcagcatctgtggaggttagctcctaaaggtcccaaagaacaggaaacatgcaggaataaaggactcctcatgaagagcaggtgggagcgagtgggcagg

SEQ ID NO: 1404 - DNA, 243 bp, Homo sapiens
tgaaggggttcttggaagacctggcacctccagagcgcagcagcctaattcaggattgggaaacatctgggcttgtttacctggactatattagagtcattgaaatgctccgccatatacagcaggtggattgctcaggtaatgacctggagcagttacacatcaaagtgacttcactgtgcagtcggatagagcagattcagtgttacagtgctaaagatcgcctggctcagtcagacatgg

SEQ ID NO: 1405 - DNA, 168 bp, Homo sapiens
aaaccactggatctatctaaatgccgatttgagttcgcgacactatgtactgcgtttttcattcttgtatttgactatttaatcctttctacttgtcgctaaatataattgttttagtcttatggcatgatgatagcatatgtgttcaggtttatagctgttgtgttt

SEQ ID NO: 1406 - DNA, 486 bp, Homo sapiens
ctggacatacagaaattgttgaatttttgttgcaacttggagtgccagtgaatgataaagacgatgcaggttggtctcctcttcatattgcggcttctgctggccgggatgagattgtaaaagcccttctgggaaaaggtgctcaagtgaatgctgtcaatcaaaatggctgtactcccttacattatgcagcttcgaaaaacaggcatgagatcgctgtcatgttactggaaggcggggctaatccagatgctaaggaccattatgaggctacagcaatgcaccgggcagcagccaagggtaacttgaagatgattcatatccttctgtactacaaagcatccacaaacatccaagacactgagggtaacactcctctacacttagcctgtgatgaggagagagtggaagaagcaaaactgctggtgtcccaaggagcaagtatttacattgagaataaagaagaaaagacacccctgcaagtgg

SEQ ID NO: 1407 - DNA, 560 bp, Homo sapiens
aaatatatgcttttctagaatttgatgtttgaccatttatgacttaattaccagagagccagtaaattaggacagtgtttcaacaagcctaggctatctcgtaagttgaaaaatatcccactatagttgcttcatgagtatgaagtaagatggcctctgatttacactggttcaatttacaaattttcaactttatgataggtttatcagggtactaaatgcatttcaacttgatagtttcaacttatgataggtttaccaggatgtagtcccactgttgaggagcatctatttaggagttaattactttagtaataagtggaaagtaagataccttgagtaatgtttgcctataaaattgtcagcgtatttttacactattggctcaagaatgttataatgctaagggacataagttggcaaccacttggtttttggaaggactttcggtattgtattagaagtctgccctagctgttaaatttctgggtatttatcctaaggaattaattaaagagttaattgttcctttcttcagtgggccattgttttagatattt

SEQ ID NO: 1408 - DNA, 360 bp, Homo sapiens
ctgcctagttgtagttgacagacaactttataagctctagtcaaccctattgactaagcttctgaaccactagcatagttctagggtcaggcggatgcctactgtgggcaggaaagtgatgcatgcatgtgtgggagcagtgtcttaatgtctgaaatagtagccatgagctacatgtggctatggagcacttgaaatgtgggagtccaaattatcatgtgctgtgagtgtaaaataatatgtttctaagaccgtgtgtgaaagaatataaaatatctcattaaaaaatgtttatattgagtacatgttgaaataattttatatttgtgacacattgtgttaaataaaatattaaaattt

SEQ ID NO: 1409 - DNA, 208 bp, Homo sapiens
ccagtccaacctgctcctcattattgtataaatgagcagaatcaatatggcggaagccagcttcaattgccaatttggtggcctctaaagctttacttttaggaacctctgcaggcgcataggtgccaaatcccaggacaggcatgaagtgaccatcattcagcttcacacactgatatttcgaatccatttctgtcactagcctggc

SEQ ID NO: 1410 - DNA, 404 bp, Homo sapiens
aaaaaaaggaaaaagttttattacgaaactagtttgtataaaacagggttatacatatttttgtaagtttgtaataaaacagtaagaaaaaaaaggcagtaatagaaatctccaaaaggcaacctatcaaaaccaactggctgccactttgagtttggacagtagctgcataaactttgttcttcttgarcagtatttaataacatcattaatacattaacaacatttctataaagtaagacacattggtgctgaagtacaactggtggcctcttgatctcacctatgaggagagttctttacamawccacatagggaaaattgcagttgtaaggtgarctacacatctaaaatatgcagaggtaatagcattacatgttaaagtatcaagatatacacatttt

SEQ ID NO: 1411 - DNA, 623 bp, Homo sapiens
  misc_feature 428, 469: n = A,T,C or G
ccacttgttgagatatggggagcctacactccggagggstgtacctttagcactggccctcatctctgtttcaaatccacgactcaacatcctggataccctaagcaaattctctcatgatgctgatccagaagtttcctataactccatttttgccatgggcatggtgggcagtggtaccaataatgcccgtctggctgcaatgctgcgccagttagctcaatatcatgccaaggacccaaacaacctcttcatggtgcgcttggcacagggcctgacacatttagggaagggcacccttaccctctgcccctaccacagcgaccggcagcttatgagccaggtggccgtggctggactgctcactgtgcttgtctctttcctggatgttcgaaacattattctaggcaaatcacactatgtattgnatgggctggtggctgccatgcagccccgaatgctggttacngtttgatgaggagctgcggccattgccagtgtctgtccgtgtgggccaggcagtggatgtggtgggccaggctggcaagcccgaaaactatcacagggttccagacgcatacaaccccagtgttggtgggcccacggggaacgggcagaattgg

SEQ ID NO: 1412 - DNA, 171 bp, Homo sapiens
gcggcgctgggggtgctggagtccgacctgccaagtgccgtgacacttctgaaaaatctccaggagcaagtgatggctgtaactgcacaagtgaaatcactgacacaaaaagttcaagctggtgcctatcctacagaaaagggtctcagcttcttggaagtgaaagaccag

SEQ ID NO: 1413 - DNA, 189 bp, Homo sapiens
aaaagtcataagggttttattttgtatcatcaaaatattctataaggtcccaaatactctttttcaacccatgaacagtaagaatttgtgaattctgataatgaaaaaagttttcctccaggtatgtttgtttcacattcagtcctaaagccttgagctatgtgtacttccctcacacaggaacaccag

SEQ ID NO: 1414 - DNA, 564 bp, Homo sapiens
  misc_feature 511: n = A,T,C or G
cctccccagcgcccaaaggtctattacaagtacctatagacttttcacatataagttctagtgggtacaagctttttttttttttttttttttttttttttctattgggkatttcattcattttggggggggaacaaattctacaaactgctttaatattgkcctttttttctaatattcacattaactttttatgtaaaacataccaatgcttttaataaagcttacataggaataaactattatagacctgcatagatataagtacccatgtattaatctacattaaaataatggattttattctgcgaaractccaagttgctcctgggkgctaagkgaagcacttagggaaatgtgttcagtctttgaggtcataggaacattarattatatcaaaggaaacctggagccatcagctaagtggcccttctgtcctgtagatacataaaaactaatgggctccgctatgcggctcactttctgctattagatactatgaggcactaanaaaaaactactgcctgcatcatatctttcttcggtttgagataaagagaatgg

SEQ ID NO: 1415 - DNA, 231 bp, Homo sapiens
ctgcgcttggataacaagtaattcaacgcacgcacttaacagaaatgttaaactataacaagcaccatttgaggattaacaggaacatttttttgaagatttcaaacgaactcgactttcagtataattgtacctaaagtatttataaacagctcatcggagcctctatttgtcatagacttttgagttgattgttgggaccacataataggaccatttttttttgtcttt

SEQ ID NO: 1416 - DNA, 540 bp, Homo sapiens
cttgatttaggatctgtggtgcagggcaatgtttcaaagtttagtcacagcttaaaaacattcagtgtgactttaatattataaaatgatttcccatgccataattyttctgtctattaaatgggacaagtgtaaagcatgcaaaagttagagatctgttatataacatttgttttgtgatttgaactcctaggaaaaatatgatttcataaatgtaaaatgcacagaaatgcatgcaatacttataagacttaaaaattgtgtttacagatggtttatttgtgcatatttttactactgcttttcctaaatgcatactgtatataattctgtgtatttgataaatatttcttcctacattatatttttagaatatttcagaaatatacatttatgtctttatattgtaataaatatgtacatatctaggtatatgctttctctctgctgtgaaattatttttagaattataaattcacatgtcttgtcagatttcatctgtataccttcaaattctctgaaagtaaaaataaaagtttt

SEQ ID NO: 1417 - DNA, 350 bp, Homo sapiens
  misc_feature 3: n = A,T,C or G
ttnatcatctaactgtgggatctatttcatttctggaaataacacaacttagttctagggctttcatgcacatgaaatataaaacagcttagttgttctgaaaacatgacaatggttaattttattcaagtcccaacactgagttcagagcacttctccataggccccattaatctctccaggtttctgggagtatcattaaatccctcggcatccttaagaagcaggtgcttagcaaacatccagtttccaaatgagagtcagaggggcttgatcctgaaagtgtagtattttcctgccttgtcctactggtatagcttcttggacctaaaatctctctcctgctgagg

SEQ ID NO: 1418 - DNA, 425 bp, Homo sapiens
tgctaggcagccttattttcataacccawttagggaaaggaaatttaggattttcaaggctacattaatttttcctccatcaaatcttgatttgttcttgataaaaatgagttcttttggggaaattctttctttagacaccaacttggtttttctcatcttccacagaataattgaacccctgacctctagatgttcaaaattccgcttcaagcctctgtcagataaaattcaacagcagcgattactagacattgccaagaaggaaaatgtcaaaattagtgatgagggaatagcttatcttgttaaagtgtcagaaggagacttaagaaaagccattacatttcttcaaagcgctactcgattaacaggtggaaaggagatcacagagaaagtgattacagacattgccggggtaataccag

SEQ ID NO: 1419 - DNA, 390 bp, Homo sapiens
aaactcttgctattgaattgagatgattaaaatggtgacttaatccgtagttattttgcacccactgaaaggaaagtgctttccagaataatatgaagtatctaaaagtgtcaccttttcttgcctgatcaacaatttgggcttcctgtttgtacaaggggccatttggcatacctttcacagcttttatcaggccaagttaaaggctgactacattttttcatcatgaggaaagcagttgaaatgaggcatgagttactgtgcattgggattttagaacaattttcttgtgacagctctttttgtgaagttaggttcttaaaagtgcccatgatggtcacttaaaatgtgcagtaatagcactgccaggatcaagcatgaaaggctttt

SEQ ID NO: 1420 - DNA, 480 bp, Homo sapiens
  misc_feature 322: n = A,T,C or G
ttgctgaacaatgacatcgttttctccaggggttgaaatccatgtccatggctgacaacccaacaaggctgggacccaaattcgtacagagatgaggcagagtggagagaaacaactctggctgagccagagtctccagccactacttcttattcctgggctttagctcttcggctgcattacgcaggaaaatgtaattttttttctggggattataaaattcatgtccctttgaccagtcgtagctggaagcgtatgcaaatatgtttccattgygattgaaacagcaagctgasatgggctgayctaactgttccgaagnttttagttttgktctggcatctttgycccagaagctgaatctaccatcagatcccacagttgcaagggtgccatgaacaggatggaacgccgattccatttacccgcataaatgycctgaggagctgaagtgttggttccattagatcgatgacattt

SEQ ID NO: 1421 - DNA, 453 bp, Homo sapiens
aaactgattgaggtcacagtattttattatttggggtcctcaccacaggaaacactgcgatacaggggcaaaagagatggcagtgccaattaaattaatacaacaaaatcaatgcagcaccaaccaagactgccaggtctggtgtcatgggtatgcccagagcccaggagttcagaagggccctaagcctgatttaatgctctgctgttgatgtcttgaaattcttaacaatttttgaacaaggggcctgcgttttcacttcgcactgggccttgcaaattacatagcgagtgctcataaaagaactcagaaacgtggtacctctcttcctggtggatacaaataaagaaatctggatccaaagttgaaagttgctggcgatatcattcaagtaggactctaaatagtggattaagatgagggtgggcctgggtgaagattctttccagcttt

SEQ ID NO: 1422 - DNA, 542 bp, Homo sapiens
  misc_feature 4, 151, 166, 220, 231, 308, 349, 364, 511, 528, 537: n = A,T,C or G
tttncttgaccactatacggcacaacctaggggstgtawaaaacctascrcaatgcagaagggtgaagcttcatgacaattggtctcggcaataatttgggggatgtaacatcaacgaatcagacaacaaaagcaagggaatacacatggnactaaatcagtgtgnggaaaaatatcccaaacaggcaaagcacaacatggamtagatatatgcacattnatggaccctgnaggcakkactcacaaacatactacctgggaagcamctggacctttaagggatgaggtagattcaacaaacagggcancgtatmttccactgggatagcattccagccttaaaaataangaaatcttgaaaagnactacaataaggacaaatctcgaacacattctgttaagtaaaacaagacaagccaaaaagggaaaactgtataattacacctatgtaaaatatttagtcaaactcaaagaaaccaagtgttgtagtctcagcagggcaccaagatgnaaacagtctctcatagnctgagatangcatc

SEQ ID NO: 1423 - DNA, 252 bp, Homo sapiens
ttaatgccaaatggcaaagttgcatccgtggaaatggttaaatatcatcactgtcgggatgaacccctgcacgccctctatgacaatgtggagaaactctttccaggttttgagatagaaactgtgaagaacaacctcaggatcctttttaataatgctgtaaagaaacgtttgatgacagacagaaggattggctgccttttatcagggggcttggactccagcttggttgctgccactctgttgaagcag

SEQ ID NO: 1424 - DNA, 273 bp, Homo sapiens
tttccactctgcacattgtagagggaacactctgtaggcccatgggtcccttactagagaggttgagtgaatttgccttcagttaacatgggaccttctgtttagcttcctcttgcttcccaaagattttaagcattttgtaaatgtataaactcacctctggtaacagtggcccagacgctgctttgtgctaaaagcatgggaaatgtaaaggcagtctttctctgggaaatggatgctattctattctgctgcccctacctgttcctgagg

SEQ ID NO: 1425 - DNA, 618 bp, Homo sapiens
aaaaaccttgtatagcaaaataacttaaaaccctttgtgatatcatcttaccagtttatttggtaaaaacaaacagttatttggtatttgtcagaattcttcagtgcctgctattacagctattttccaattactaatttgattatactcactcaaggcagtgcaagatcttgaagtactttttagcagttaagtaatattgaattgtattgaatagtttacatagtttattctagtctttgaaaattactgaacatggacaatgtgcatgtcattgacatctgccttagaacttctgggacaatcctgattcgagagattctatcccattatttacatataccaaaaatactttgttaatttaatgtgttggcttcccaactcctgaacacgacacaattttattattagattttgtatggtgattttaggctatgaaaacatgatcattatatgtatatagatacatttttatttgttacaaatgtttgagcagctcactagcccacccctcctctattttgggtaagagaatttactaccttttttaactatgtagttgagagcaacatgtattttgttatttttagaatggtcagtatattgctataaaatttt

SEQ ID NO: 1426 - DNA, 565 bp, Homo sapiens
gtggtagaaagagatgacggaagcacattaatggaaatagatggcgataaaggcaaacaaggcggtcccacctactacatagatactaatgctctgcgtgttccgagggagaatatggaggccatttcacctctaaaaaatgggatggttgaagactgggatagtttccaagctattttggatcatacctacaaaatgcatgtcaaatcagaagccagtctccatcctgttctcatgtcagaggcaccgtggaatactagagcaaagagagagaaactgacagagttaatgtttgaacactacaacatccctgccttcttcctttgcaaaactgcagttttgacagcatttgctaatggtcgttctactgggctgattttggacagtggagccactcataccactgcaattccagtccacgatggctatgtccttcaacaaggcattgtgaaatcccctcttgctggagactttattactatgcagtgcagagaactcttccaagaaatgaatattgaattggttcctccatatatgattgcatcaaaagaagctgttcgtgaag

SEQ ID NO: 1427 - DNA, 144 bp, Homo sapiens
ccactagttatttttatgtaatcaattacggggtcattagttcatatcccatatatggagttccgcgttacataacttacggtaaatggccgccaccgcggtggagctccagcttttgttccctttagtgagggttaattgcgc

SEQ ID NO: 1428 - DNA, 214 bp, Homo sapiens
ccactagttattattatgtaatcaattacggggtcattagttcatagcccatatatggagttccgcgttacataacttacggtaaatggcccgcctggctgaccgcccaacgacccccgcccattgacgtcaataatgacgtatgttcccatagtaacgccgccaccgcggtggagctccagcttttgttccctttagtgagggttaattgcgc

SEQ ID NO: 1429 - DNA, 253 bp, Homo sapiens
  misc_feature 12, 16: n = A,T,C or G
ccactagtccantttngtggaattctgaagccttaattgcttatatccatgtttctagtgaaatgagagggtataacaaaaaagagaacaggaggaaagcttcgctgtgcctgaggaaataatctagtcaaggcagcaagtctggatagtgctatagagatgagatacctgagcagttccagaggaagaggtggagatcagaggccagttttcagtgaacactgtaaagaaaagccagatgatgtgtcctgga

SEQ ID NO: 1430 - DNA, 232 bp, Homo sapiens
aaattttactagtgttacttaatgtatattctaaaaagagaatgcagtaactaatgccctaaatgtttgatctctgtttgtcattactttttcaaaattatttttttctgtaaagtataatatataaaacttcttgcttaaattgaatttctatattagtggttaattgcagtttattaaagggatcattatcagtaatttcatagcaactgttctagtgttttgtgttttt

SEQ ID NO: 1431 - DNA, 734 bp, Homo sapiens
cattatacaacactatattgccaggtcaaagagggcagggacgtaaatgtacactaaaatgcmaatgtatcccaaagagataaaacaaattccatttacagcatgaaggtttacaaatgtacacctgtacaaccaaggaaagcatcactactaaattagcaaggcttttataataaacattgaaasaagatttcctttcaaagtgtaaacttacatctattactacacacacaatgcatatatttatagaaagcaaaaagagctatctgaatatgtaatcatgcttaaatgctgagctatcaaattcacttttcagtggccccttttcatctctatctggttcctactttctgcctctatgaaaaagcaaaataaagctcaacacttcctcaacatgtctgtaattctataagcaaaacaaaatacaaatttccactctttctcattgcaaaccaaactgaaaagttaataagtgacttaacttttcatttagtgcacttaattggaagtgtcaccatgattttgtatttaactcttacaacaattacatatgtaagtatatacaatatttctgtacattgccagagacattttagggcagtaattgtattaaaaccacatctactgtaaataatgttaggttcttttcatctcaaaccactttattcttgcctacttactcgttatttgcatgatagtttgtgaattatcaaaatacaacttaactctttaaa

SEQ ID NO: 1432 - DNA, 542 bp, Homo sapiens
tttaagaaagagcctttgagaaacatgcatacttttctcttttctcctatattcaatactcatatagcctaaaagatggaaactggttcaagaatttaaatgacttgttccctaaaaagttaatctcctcacctttgtgaaatatatcaagtgctttctataaataagggcaggaaatgctaacttcataagcatagtcctagtcattaaaataatttgatcatcttctaaaatttaagtatgatagtaacacagtaatatggaaaatctcaatatacttaacacttcctaaacagcacaatgaaatgttgttcaaggtctgaattaatttgctacaggacctaagcaagtctgtttgcttatcttttggctttaaaattctttaagtctaaaatggtgataattttagaataaactgacaatgtggggaacaaacttaaattcacaaacactacccatatgctcaaaaactctctgggataattagtttcttcattgtaactattgatgtactattatttcatctttccattagctctact

SEQ ID NO: 1433 - DNA, 175 bp, Homo sapiens
ttaaattgattcaaaaaaacttgacacctgtcatgtaggccacaaaatagtagcgaactatactaagtggtatagcccactgtggagtgtggtcttttactcttccaaatagcccaagttggcaaaggttacttaaaaacctgccccccaaaaagctaacttttggtagattttt

SEQ ID NO: 1434 - DNA, 90 bp, Homo sapiens
ttaatcactattgatggaagcttatattccttatgaatatatacatgtatgcatatatacatctctgtatgaatcactcaaagcaatttt

SEQ ID NO: 1435 - DNA, 153 bp, Homo sapiens
tttacctttgtgctttgaaggttctaccatttakaaagtaaaaagccaacccacagaatggaagaaaagaggacagactctaacaagcgttcacaaagatggagagaaattgtaaccctcatatattgctggtagaattgtagaaagatgcag

SEQ ID NO: 1436 - DNA, 483 bp, Homo sapiens
  misc_feature 36: n = A,T,C or G
tttttagtttaaagaagagttttgccacttaracangggagctwtgtctggaaaatacactgagttgaaacacttcatccttggaaggattatataagatgaacagytgtgataaatgtgtagattagagggatgtgaatgggcagttagtccagtgccctcatttaagaggccaagatcctgattcagaggaggcatcctttgcccagagctgcttagctaatctgaccaaatgttgggaaaaatgtctcacctaacccactattccttaattatggattttgtgaaaaacaatagaacatgttaatgagtaatttatattagttcgatgtattacaattttttagctttaaattacagytttcttataatgttgaaatgttttagaatcctttgaatctaagtatttgtttcctaaatgaaacatttgtacaacatttgatgtttttacttatgaaatattctcctcccccaagaaaattt

SEQ ID NO: 1437 - DNA, 171 bp, Homo sapiens
ttttgccacctcaagaagccattttcttgtctgtttccttctttacctacccctacaacctatgaacaaataccataacttaaaaatttaggtagtctacaactcctacaaattttaagttcagagactacccaaagaactgtggaagatgcagcaatataaaagtttttt

SEQ ID NO: 1438 - DNA, 408 bp, Homo sapiens
tctgagtggaggtaggctaacaacacattttgactttstcctcaaaggatagctttgaaaaacaagtgtaaccaattgttacaccaaattaaaatggcaatattaaatcggtaacaaaacgatccacattttatacaatattgtatttccaaacatacataggtcatgaaaatcagagaacctaatatagcaccgttgaaaccattcattatccttcatgtgtgtatgcaattcagaatttcggcagaagacaacaaatggaaaatgcctttcgtttctataaatcattttggatttcaattaaatctttgccttagtaaagggtattcttatctcaagatcaattagccgtttttagctccaccgttttggaagtaaaaatgatgagctacatctactttttaattt

SEQ ID NO: 1439 - DNA, 168 bp, Homo sapiens
ttacacaacagctataaacctgaacacatatgctatcatcatgccataagactaaaacaattatatttagcgacaagtagaaaggattaaatagtcaaatacaagaatgaaaaacgcagtacatagtgtcgcgaactcaaatcggcatttagatagatccagtggttt

SEQ ID NO: 1440 - DNA, 307 bp, Homo sapiens
tttcacatacgaagaaatcaactgtgattatgaagtgacagccagctaaatatgtcttgtattttctctcttcctttttttgcctaactcatcctttacttccattcctgcttccatggtaatgcaggctcaaataaattactaggatacaagattacttcaagcctcttttctgtggaactcataatatgataagcatttgttacaagattgcctgtagttgtttaggggacaaattatattagggaaagaaagtctttctttagttggttaaattttctattataattgggtactaaatttattt

SEQ ID NO: 1441 - DNA, 684 bp, Homo sapiens
  misc_feature 600: n = A,T,C or G
ttaagttctggagtgttcacttctgagcctgaattccctcccctgcaaaatgggggaataccctcctcagagggtccctgcgagggtgaggggagattcagcatggcaggtgtgctgggcacggcagggcctgggaagggcagatcctttccccatccctgccacaaacaacccaaacctttaaaggagagcaatggccttgtgtcaaaaacaaaaacaaaacaaaaccctgtcctaggagactggggccctaatttctaatagcaagcctttatgagtccctaacactctactgggctgagtatctcacacgccagaggataacctgccttctgctcaccaccaccccgtagtagttgtcattgtgtccatttcacagatgaggcaaaggctcagaagagtcatgtgttaaaccagcttctagagcccatgcaggagctgcaggtgggagaatcacctctaggtgctcttcccatagaatcctcacctcctgagtgtcactcactcagcttccaatgggtgtgtgacctttgaccagctttcttcctctctgggcctcagtttcccacctggacaaagtaagaggtctcttggcttcangtaagttcttcctaaacttctttttccttttcatttgagcatcctcttcatttttgccacctctctgtcatttacaggcttttt

SEQ ID NO: 1442 - DNA, 166 bp, Homo sapiens
aaaaaatcagcccctaatttctccatgtttacacttcaatctgcaggcttcttaaagtgacagtatcccttaacctgccaccagtgtccaccctccggcccccgtcttgtaaaaaggggaggagaattagccaaacactgtaagcttttaagaagaacaaagtttt

SEQ ID NO: 1443 - DNA, 194 bp, Homo sapiens
tttgccctgtcaaaagaagagctaaagacagttatataaaaattaaggtgggctttcagactggctaacacaacaacattccatgagtagatggtaatttatttttgtttatccatttcgttgggagcaaggacaaaaatgtaaatctacaccttgcttatcaaaattgccgaaaaaagaatgctctgcctttt

SEQ ID NO: 1444 - DNA, 96 bp, Homo sapiens
gagagtcgagagtgggagaagagcggagcgtgtgagcagtactgcggcctcctctcctctcctaacctcgctctcgcggcctacctttacccgccc

SEQ ID NO: 1445 - DNA, 365 bp, Homo sapiens
gggatgagctgaccaagaaccaggtcagcctgacctgcctggtcaaaggcttctatcccagcgacatcgccgtggagtgggagagcaatgggcagccggagaacaactacaagaccacgcctcccgtgctggactccgacggctccttcttcctctacagcaagctcaccgtggacaggagcaggtggcagcaggggaacgtcttctcatgctccgtgatgcatgagggtctgcacaaccactacacgcagaagagcctctccctgtctccgggtaaatgagtgcgacggccggcaagcccccgctccccgggctctcgcggtcgcacgaggatgcttggcacgtaccccgtgtacatacttccc

SEQ ID NO: 1446 - DNA, 386 bp, Homo sapiens
tctggaaagttcttgctcgggtcccttcacctccccgccctttcttaragtgcagttcttagccctctagaaacgagttggtgtctttcgtctcagtagcccccaccccaataagctgtagacattggtttacagtgaaactatgctattctcagccctttgaaactctgcttctcctccagggcccgattcccaaaccccatggcttccctcacactgtcttttctaccattttcattatagaatgcttccaatcttttgtgaattttttattataaaaaatctatttgtatctatcctaaccagttcggggatatattaagatatttttgtacataagagagaaagagagagaaaaatttatagaagttttgtacaaatggttt

SEQ ID NO: 1447 - DNA, 261 bp, Homo sapiens; identical to SEQ ID NO: 288

SEQ ID NO: 1448 - DNA, 404 bp, Homo sapiens
aaaaaaaggaaaaagttttattacgaaactagtttgtataaaacagggttatacatatttttgtaagtttgtaataaaacagtaagaaaaaaaaggcagtaatagaaatctccaaaaggcaacctatcaaaaccaactggctgccactttgagtttggacagtagctgcataaactttgttcttcttgaacagtatttaataacatcattaatacattaacaacatttctataaagtaagacacattggtgctgaagtacaactggtggcctcttgatctcacctatgaggagagttctttacaaaaccacatagggaaaattgcagttgtaaggtgaactacacatctaaaatatgcagaggtaatagcattacatgttaaagtatcaagatatacacatttt

SEQ ID NO: 1449 - DNA, 230 bp, Homo sapiens
aaaagttctagtggtacggtaggagctttgcaggaagtttgcaaaagtctttaccaataatatttagagctagtctccaagcgacgaaaaaaatgttttaatatttgcaagcaacttttgtacagtatttatcgagataaacatggcaatcaaaatgtccattgtttataagctgagaatttgccaatatttttcaaggagargcttcttgctgaattttgattctgcag

SEQ ID NO: 1450 - DNA, 194 bp, Homo sapiens
aaaaactccttttggtttacctggggatccaattgatgtatatgtttatatactgggttcttgttttatatacctggcttttactttattaatatgagttactgaaggtgatggaggtatttgaaaattttacttccataggacatactgcatgtaagccaagtcatggagaatctgctgcatagctctatttt

SEQ ID NO: 1451 - DNA, 106 bp, Homo sapiens
aaagatgacaaatactggttaattagcaatttaagaccagagccaaattatcccaagagcatacattcttttggttttcctaactttgtgaaaaaaattgatgcag

SEQ ID NO: 1452 - DNA, 349 bp, Homo sapiens
ctgcagatcctgcggaacgtcacccaccacgtttccgtgaccaagcagctcccaacctcagaagccgtggtgtctgctgtgagcgaggcgggggcgtctggaataacagaggcgcaagcacgtgccatcgtgaacagcgccttgaagctgtattcccaagataagaccgggatggtggactttgctctggaatctggtggtggcagcatcttgagtactcgctgttctgaaacttacgaaaccaaaacggcgctgatgagtctgtttgggatcccgctgtggtacttctcgcagtccccgcgcgtggtcatccagcctgacatttaccccggtaactgctgggcattta

SEQ ID NO: 1453 - DNA, 302 bp, Homo sapiens
aaaaataatgtgcaagagcatcatgagaaagaagaggggtgaagagataatccagaggaacatcaaatgtaagagtatacactcaaagacaggtttaagaaagaccagtcagagaagtaaagaaaaaaatcaagcaagaataatgttgcaaaaattaacaagaaagttgcaagcccagagtggttagcaatgccaaactaccatgagtaagccacataaaacaagaactttgggttcaactgctttaacaatcagacctttagattcacataacaggagttacaaaattaagagcctctttt

SEQ ID NO: 1454 - DNA, 268 bp, Homo sapiens
caagcgtaaaccgcgggagccgagcccagctaggaatgcagacctcctgaaaaccaagccgaggactgcggggtccggtgtccacgcagagtgtcagcttcctctggtgcaaccagcaagtcttccagtatgaatcccacagaaaccaaggctgtaaaaacagaacctgagaagaagtcacagtcaaccaagccaaaaagcctacccaagcaggcatcagatacaggaagtaacgatgctcacaataaaaaagcagtttccagatcag

SEQ ID NO: 1455 - DNA, 207 bp, Homo sapiens
  misc_feature 29: n = A,T,C or G
ctgtcgagagcagccctgcccaagawtgncgggtgggggctggtgccaacgggttcccaaggscctttcmactttkgaakggctggarttcttgggaaaccmaaacsktgactacctgscttttttcttgggcatygacstgcttcatttccaaaratgatggkgcaggtgaccttttccatcgtgagctaaaaaaaggttaggagg

SEQ ID NO: 1456 - DNA, 181 bp, Homo sapiens
aaatttctgtctgctaaaatctatcaaatacattaaggaaaagtcccacttggcacatctcccacaccagatgttaattattcatactgcatgactgaggattttggaggcagagagagattcatctgcaatatttggaacaccaatggaggtctacgtcaacacagaatttatacagcag

SEQ ID NO: 1457 - DNA, 309 bp, Homo sapiens
aaaaagwtcagagttgaaatgcctttcaaccattkccttctgtggtcatttttcttgctgcctttttcacccaagattcagcagtcagatgtttactgcacacctattacctattatttgctgttcttgcatggttcaaaccaccattctgtagccacccatcctttgccttatctaacaaacatttttccaggaaggtggaaaaggaagtgttgctctcattgtgtgactcagtgctgctgtccatcccatggaaacatgggcacaatcaagtatttgtccagcctattgcaggcttttcctgacttt

SEQ ID NO: 1458 - DNA, 117 bp, Homo sapiens
aaagactattgagaaataggaaggtattgagagattattgggtttcatcakagcagacttaagtagcctggttgattttagatttgtcacagcaaaatcatgcttggatgctcgagg

SEQ ID NO: 1459 - DNA, 575 bp, Homo sapiens
  misc_feature 371, 379, 428, 469, 498, 506: n = A,T,C or G
aaagaatgcataccagaacatttataagcagtggagtgagkthtattaagaatagtactactacaataaacgctggctaaataagaagtgcattatgtgaagcactatgggtggtatatgcttwgmcacatactctkgttaccttgaggyagatmacrcatgkgaaccaacttcggcatacattttcagttgctgcgaggaatcatgtgttttaacgaaatgcgtcagtatgaaaaacttgaaaatattcatgaatgawgaacgcmttaggaaaaaaatakstattctcatgcaattatgtacagtctcactgtgtaratctcaaggcaaggtttgcctcctgtaaaccagatcaaggtgctatgagagancgccytgncttattgcatttcttttctcctmctgcgccagcattatattgctctagnctttatttttgtgtgcacactgacatgccattaaaratgangractatctcacatgtagaaaargaaagnmcttggankctacctcaggtcgctaccacgctaagggygaattctgcaggatatccatcacactggcggcgcgattg

SEQ ID NO: 1460 - DNA, 444 bp, Homo sapiens
ctgggggttccttccttcacgttgagaacctggagcagagagtctaccaacttaagaaatattagaaagagttcagcaaacagagtgagctgaagtctaatcctagaagtaaatccattcctacaagtcatcagcatcacttgggagcttgttagaaaggcaaattcttggttcagcctaacacctactaaatcagaaactctgggggcggagcgcagcaatctgtactttcacaagccctgcaggtgattctgagcctgtaaaatttgagaaccagagctgtcccccaggagataaattaacttctacttttttttgagctactgcattttgggatcttattgttttatcagcttaacatgcatcctgatatgattactcaggtatgtttcaaccaatgttggttaatgtattatccccaggaacttattactagaggagcag

SEQ ID NO: 1461 - DNA, 536 bp, Homo sapiens
ctgcaaccctgggactgaccgggaggctctgattatttacccmaccacaggtaggttgtgttctgaatctcaggttcacaggttaaggttcagcatcctcatcctccacggggttggagttgttgctggtgatgaagggtttgggtggctctgcatagactgtgatcgtcgtgactgtggtcctattgaggccactggctgagttattggcctggcaggtatagagtccgctgttcttctcagtgatgttggagataaagagctcttgtgtgtgttgctggatgttcccatcaatcagccaagaatactgtgcaggtgggttagaggctgcatggcaggagaggctgaggttcacccctggacggtaataggtgtatgagggggaaatggtggggkcrtcygggccatagaggacattcaggatgactgrgtcgctgtgstyarcacttaatkcgttctggattccacactcatagggtcctacatcattccttgtgacaytgartagagtgagggtcctgttgtcattggacagm

SEQ ID NO: 1462 - DNA, 409 bp, Homo sapiens
ctgakagaccaggagaagttccagatgcagagactgtgatgctcttgactatggaattattgcggccagtagccaagttagagacaaaacaggcataggtcccgttattatttggcgtgattttggcgataaagagaacttgtgtgtgttgctgcggtatcccattgatacgccaagaatactgcggggatgggttagaggccgagtggcaggagaggttgaggttcgctcccgaaaggtaagacgagtctgggggggaaatgatgggggtgtccggcccatagaggacatccagggtgactgggtcactgcggtttgcactcactgagttctggattccacatacataggctcttgcgtcatttcttgtgacattgaatagagtgagggtcctgttgccattggacag

SEQ ID NO: 1463 - DNA, 502 bp, Homo sapiens
ccttcagcctggatcctttatattaagatcaatgaggaccatttctggaagatgtctggcatggtacagactgtctgaggccractgaacacaggcccttaccctgattttatcagtgaaaagctatgggactagtttccttacctctaaaatggagagaataatagaatcttccgtctaagactkctgtgagcataagccgagaaaatggaggtaaactgcttagcccaatacttggattatcgtaaatattcagtaaaactagccaccgttgttattgtaattattattttgtattttattatacatttcatggaaacttaaaagttagtgataatcacctcattttcagttgccttgctttcttcctgtaaattttattctctcttatcttgctcactgtctttaagcattgccagtttagtataattattttcccctatcctctataaaatcatatacaggatggatttgttgatctcagacatgttcactgagtttt

SEQ ID NO: 1464 - DNA, 294 bp, Homo sapiens
ggcggctcggactgagcaggactttccttatcccagttgattgtgcagaatacactgcctgtcgcttgtcttctattcaccatggcttcttctgatatccaggtgaaagaactggagaagcgtgcctcaggccaggcttttgagctgattctcagccctcggtcaaaagaatctgttccagaattccccctttcccctccaaagaagaaggatctttccctggaggaaattcagaagaaattagaagctgcagaagaaagacgcaagtcccatgaagctgaggtcttgaagcag

SEQ ID NO: 1465 - DNA, 249 bp, Homo sapiens
gtgcaggtcttcagccgtgacccggtaccccagctctaagggaggtggcagcatcaaaggctcccctcgcctgcgtggcagcaggggaatcttgcgtctacggggcctagagtcatgggatctgggggagccacccctgggggcaagtgtctgccctggtgctgtacctgccttgttttcacagcggtgacccgaagagacagcctgaggtccgtcctcactcactgtgtttgaggaactgtgggccag

SEQ ID NO: 1466 - DNA, 203 bp, Homo sapiens
cctcagacaccttttaattgcttaggagaaaccattgtctctgactgcaggtttgaataagttgaagaccagagaaaagtacacactgggctacaaaggaatttggagatagccaaggaacaggatttcccctagcaagctaccttctgttcaaatcatgaaaaaagactatttccccttagaatagggaagcttgctatttt

SEQ ID NO: 1467 - DNA, 223 bp, Homo sapiens
ctgtcagaacaggaacgacctgggttatggaagcccagaaagggaggaggacttcttttggtcccagtgaaagatgcttccagaatctgtagccttacttatttgcttggatctcactggaataacttggtggtgaggtcaccggttctggggtgatcactgggtttgctgcatagatgtttggatagatgacactcacattgcttgattgacagcagaccaa

SEQ ID NO: 1468 - DNA, 177 bp, Homo sapiens; identical to SEQ ID NO: 1326

SEQ ID NO: 1469 - DNA, 185 bp, Homo sapiens
ctgaagctgagaagtagcctatctatggargagacttttgtttgtgtttaattagggctatgagagatttcaggtgagaagttaaacctgagacagagagcaagtaagctgtcccttttaactgtttttctttggtctttagtcacccagttgcacactggcattttcttgctgcaagctttttt

SEQ ID NO: 1470 - DNA, 482 bp, Homo sapiens
ctgaccaggagggacggttctgtggacgaggacttcgtagctgaggagccagatttctttttggtcccttcctcctggaatggaatcgtggcgctactgtggagatctgagttgatgtagcacctgcttcctcggatgtagtccgcaccccggaccagatgccgctcggtcgtgggtctggagaaccggtatgggggagaggagctctcttcaatgatcggaggaatccgctcgttactgaaataccggcaaagggcatcctcccctttcctgccatgacctcgaggtctggcaaaagggtccacaatccccatccagttcccatcagcaggcatggacaaaggccgtggcttgccttcagagggacgagaaagaaggtgacaagtttgatgagttctggaactttagtgaaccgttccctttatgtataacttagacctcacaataccacacccacttagacagaagcaataacaaatttt

SEQ ID NO: 1471 - DNA, 257 bp, Homo sapiens
tgtgtgaacttagactkwtcaattcaacatttttaacrtatkaaatactattgtgaattcaatgaagtgttcttatgccactaactttaacctattcccttactcamggatgtaggyaaargatggtaacaatacactattkggcaagataatgtmctgacatmtytagcaatsttttttgmcagtggcttkcaactgmamwkaaskkammkaatattgytkctgtwsgtarattattattctgwywytaatcattt

SEQ ID NO: 1472 - DNA, 342 bp, Homo sapiens
cttttgcgagcctctgccgcagcagctccgttttcacgcgcatctcgtttttgtgtgtgtgtttttgttttgtttttgtttttgtttttttgtttcagagaattggaagctaaagctaccaaagacgtagaaagaaatcttagcaggtaagatgggcgagctttccgtctcccgccccacgataatcgtatatttctactccgattcgccctttctgggttgagaagttcccccgtgacattttcttccgcacccggagagcagacattcgggagaagcggcctgggggaatactggagggattgcggggagatgcgtaattacgcgtgtgtttctttcttt

SEQ ID NO: 1473 - DNA, 526 bp, Homo sapiens
  misc_feature 435, 442, 454, 462, 476, 524: n = A,T,C or G
ctgctacatgtcttcacagcccaggaattcaaggcccaggtggcagcaggaagaaacagtggaaaagcaaggggaagagaaaagagaaaaaggagggggaaagtctgcataactgtcataacctctgcttctcctgctctgtaacaaacccacaaccaggaagagtcatggtctggaacaatcatgggaccccaaacgcctgtaggttttttaccaccaaacatcacccatggctgctctaagctgtcattttgttcccacagttacctagcatcacggatgcccaatttatggcccaggaaggctgacccaggctaagggcagtctcactccacagccatgcaatggacagtctgaatgtttcctaccccagacctttactgacctctactatttcctcctctgatataaaagaaaaacacttttaattttctnctgcatnctacatctcctnctaaaaantttggcctaattgncatcaaaaccttgtaggaatctgaaattttggttcttctgaatcttancc

SEQ ID NO: 1474 - DNA, 187 bp, Homo sapiens
aaacttgtttgctgtgaacaattgtcgaaaagagtcttccaattaatgctttttatatctaggctacctgttggttagattcaaggccccgagctgttaccattcacaataaaagcttaaacacattgtccaaaaaaaaaaaaaaaaaaagccccykcccsgggggscckttmaaggggraawtccc

SEQ ID NO: 1475 - DNA, 474 bp, Homo sapiens
ccattctctttatctcaaaccgaagaaagatatgatgcaggcagtagttttttcttagtgcctcatagtatctaatagcagaaagtgagccgcatagcggagcacattagtttttatgtatctacaggacagaagggccacttagctgatggctccaggtttcctttgatataatctaatgttcctatgacctcaaagactgaacacatttccctaagtgcttcacttagcacccaggagcaacttggagtcttcgcagaataaaatccattattttaatgtagattaatacatgggtacttatatctatgcaggtctataatagtttattcctatgtaagctttattaaaagcattggtatgttttacataaaaagttaatgtgaatattagaaaaaaaggacaatattaaagcagtttgtagaatttgttccccccccaaaatgaatgaaatacacaatagatgtacaaaaa

SEQ ID NO: 1476 - DNA, 401 bp, Homo sapiens
ccttggggacagggcaggaggacgcacacctcatggacagggcggccagggctgagataccagcggggtgggtattcccggcgggtgcttacctccaacagtgtcttgtcagcaaaggccatgatgccctcaaagatgatgacgtttgcaccatacagtgttttctgtgaagaaacccaggagttgcggagcctggctcatgtgcctgcagccccccgaggccccctctgcagggccctggcctacccagtccttcttccggctgtgcgtggtgaagtcataaatgggcaccttgacactcttcccctgcttcagcttcttgagggtggaaatgatgaaggtcgaagtcaaaaggcatctggggtgggtcgaaagtttgaaagtttgcttgtggtgccggg

SEQ ID NO: 1477 - DNA, 753 bp, Homo sapiens
  misc_feature 59, 75, 152, 194, 200, 203, 205, 674, 682, 709, 737, 746: n = A,T,C or G
cagcatgcttaaaaagttggaggaattggaacagaaatacacctwmcaacctkrmcctnttaccaaaaacaaacnagtggtatkggamccsacctttmrkctttttcmacmacttatttcaaagytsrttkgtggkgaaaagmcacycyksnatscywccrcacccttgwaggcygttggacttrataacakknctgctnatnwntgtgaggggtgataytgatgrtgaaattgcacttagctgggttataattkgaaagtcaaagtcttatttgataaagatgtgaatgagagaaatacagtaaaaggatttaggaagttcaacattttgggcacgcacacaaaagtgatgaacatggaggagtccaccaatggcagtctggcggctgaatttcggcacctgcaattgaaagaacagaaaaatgctggcaccagaacgaatgagggtcctctcatcgttactgaagagcttcactcccttagttttgaaacccaattgtgccagcctggtttggtaattgacctcgagacgacctctctgcccgttgtggtgatctccaacgtcagccagctcccgagcggttgggcctccatcctttggtacaacatgctggtggccggaacccaggaacctgtccttcttcctgactcccccttgtgcacgatgggctcancttttcanaagtgcttgagttggcagtttttcttnttgtcacccaaaagaaggtctcaatggngggacccanaaccttt

SEQ ID NO: 1478 - DNA, 421 bp, Homo sapiens
  misc_feature 399: n = A,T,C or G
aaacctatactcactttcccaaattgaatcactgctcacactgctgatgatttagagtgctgtccggtggagatcccacccgaacgtcttatctaatcatgaaactccctagttccttcatgtaacttccctgaaaaatctaagtgtttcataaatttgagagtctgtgacccacttaccttgcatctcacaggtagacagtatataactaacaaccaaagactacatattgtcactgacacacacgttataatcatttatcatatatatacatacatgcatacactctcaaagcaaataatttttcacttcaaaacagtattgacttgtataccttgtaatttgaaatattttctttgttaaaatagaatggtatcaataaatagaccattaaccaanaaaaaaaaagaaaaaaaaaaaa

SEQ ID NO: 1479 - DNA, 214 bp, Homo sapiens
ggaaatatataataaaaatgttaaccagaaggtaaacttgagtgtaattgtcagacagacacacttttccaccagtgtatttgaattttagaccagtgaccctgttttgtggcattcatgcaaaacatgctgagggctttgttcatctggtcatcgtgtccaaatttcagtcatgtttgtagcaagattttggaagcattcatatttccttttt

SEQ ID NO: 1480 - DNA, 434 bp, Homo sapiens
ggaggccgcttacgtaaagcccaggggacattcaacagcccctactacccaggccactacccacccaacattgactgcacatggaacattgaggtgcccaacaaccagcatgtgaaggtgcgcttcaaattcttctacctgctggagcccggcgtgcctgcgggcacctgccccaaggactacgtggagatcaatggggagaaatactgcggagagaggtcccagttcgtcgtcaccagcaacagcaacaagatcacagttcgcttccactcagatcagtcctacaccgacaccggcttcttagctgaatacctctcctacgactccagtgacccatgcccggggcagttcacgtgccgcacggggcggtgtatccggaaggagctgcgctgtgatggctgggccgactgcaccgaccacagcgatgagctcaa

SEQ ID NO: 1481 - DNA, 131 bp, Homo sapiens; identical to SEQ ID NO: 1366

SEQ ID NO: 1482 - DNA, 324 bp, Homo sapiens
tgctcgctcctcagaggctgaaaacatgagaagctaggtgtggtgaaaccaaagcagctttattgttcaaatgctaaagacgggaggatggactggctcaagccttaaagaaaccatctcgactttttgaactcagtgaacgggtttaaggaaaacgtgggaaatatgcaaaggtggtgcaggagggtgcaggtctgtgtgtcttattcccatggatatcttgagtaatcgcttgtccagaggtggggtttgtgtcatcctgaattcaacccagcaatggtagggtactgttcataactcaccctaagccagaagattcctcag

SEQ ID NO: 1483 - DNA, 393 bp, Homo sapiens
atgtttaatgaatgatacaggatacatccctgttggaagcttgcaaaagacacatacactgtggtacatatttgatttaatagaagttgtttatcaggctatatatatatttgcccaaacatgcaccacaggataaaataactatttacataacatagggtatttaattgacatagactatcagctttgctgagagcagaagatggcaaagcaatactgcagcagaaagtggaacaactattctaaagcaatactttagatatatttttctagaatggatttattagattactttttggaaagcatttgacctaaattaaatatagagctctgaaacttagaataaaatttgcacttgctgaaacagaatactttgcataaaaataatccttt

SEQ ID NO: 1484 - DNA, 323 bp, Homo sapiens
tttagatcagaaagtttgaggtcttcatcagcagacactcgtgcttctatttttcttgttttatcgaacagttctgaaactttgagaaaaaacttgcatatatctgtagaatcctgagttcctaaagcatataatgaagaaccaattctattgtaatcatctgcagcacttttgtgggatcttgtcattctatcagatttagcagatgcatccttaactcggttatgatattccaaaagaaatgttcgttcgtgctcaaagaaatcatctacatcctttactcctgaaacgattactccatctgctgatttaaccatgttttt

SEQ ID NO: 1485 - DNA, 405 bp, Homo sapiens
aggagcgtcaggaaaacacgggcagcctgggctctgacccgagccactccaactccacggccacgcaggaagaagacgaggaggaggaggagagttttgggaccctctctgacaaatactcctcccggagactattccgcaaatccgcagcccagttccataacctgcggtttggggaacggagagatgagcaaatggaaccggagcccaaattatggcgaggccggagaaacaccccgtactggtacttcttgcagtgcaaacacctgatcaaggaagggaagctggttgaagccctggacctgtttgagaggcagatgctgaaggaggagcgattgcagcccatggagagcaactacacggtgctgattgggggctgcgggcgggttggctacctgaagaagg

SEQ ID NO: 1486 - DNA, 230 bp, Homo sapiens
aaaaatatgtggattgtgcttgacgtagcaaatttcttctatctgcaaaagcccttttctcactacctcatatacacccctttgatatggcaccatgtttgaaattggagcgtacacacatagtcattggatttactgggattctctttgtgacaagtaggagccaaggggtcatgcagggaagcgaacgtgcccgataaggatttccttgttgccagagtgtttagcag

SEQ ID NO: 1487 - DNA, 273 bp, Homo sapiens; identical to SEQ ID NO: 1424

SEQ ID NO: 1488 - DNA, 452 bp, Homo sapiens
cctactgtgccccgtaggcaaagctctgaagatttcatcgaaaaatctgctgtcaatacgtagaaaagttcactatttcagtttcacagcaaaaaaggtggggggaggggggaacccaatagatatttaagtagatgctttccaatcccattcactgcattaattagcttacctcttatacagtacaacataaacattgcatgtttatttgtatgtaacacctataagcatatagcatctacattttaagtgtatttacaaattcaacaaaatatctacatataaaaagctttacttaaaattaaacttgatgcaagttatgagaaaccaatttattggcaaatgaaactgagcattccttcaaccataggttgttatagattttcatatttggaggtaacccatttgatagatattgtttatgaatacgatagaatatatatttacttttt

SEQ ID NO: 1489 - DNA, 653 bp, Homo sapiens
  misc_feature 556, 562, 568, 573, 589, 592, 632, 637, 645: n = A,T,C or G
cctgctcttctcttcaaagcacttagtacacagggktacaggtgctaccacttggattccccagagcatggaagtctgatcccaggttgaacatatttcttctgaaaatgagcatcttggttctatagattcttatcttgctcacaggacttgctccaaaactgaattttcagaagcagcatgatagggaaagagatattcaactctgacagacaaggtagatcgaagcacccacactaatttctttcaggtgccccatgaggaagactgcatcatgtcacttccactcacttggggagattctaggactgagacacaaagttcccccagagtttctgctaatggaaggggaaacaggtggtttggaatggaaaggtggaaccaggtccacaaaatgtgctccctctgctcaagactgactttggctttcccaggtccccacttgactttcatataagctgagatgacctattacgggaaaaattagggaacacctaataaaaccaactttcaaaaactcctatttatcatggatgtgccacgatcgagagaatcnaacacnaactgnctgtnagagaggccttcattntgnctcatcttgagctaaaatcctgrcttgggatgccagaaancatgnccctcttntcggtttg

SEQ ID NO: 1490 - DNA, 363 bp, Homo sapiens
  misc_feature 347: n = A,T,C or G
taacctgacaaaataaaacttagtaaaatctakaactgtttcttggcctacttgagaggaacttccatattttcacagccatctccgaaagcagcagttgctgtaaattaactgagacttggaaatggtgcagactgtcttggtagagctgttcttatagcacaattttatctggaaaataaacttgtaaatgcgtgctgtatattaatacatgtgtgcccatatttatttttattatctcctgccagtctttgctcaatgggagatgacagaccaacttctcaacgtgatttccccatttcattgaatgagatttatatgccacttatgaaaaaaaatactgctgngaaagaaatgtacttt

SEQ ID NO: 1491 - DNA, 163 bp, Homo sapiens
taatcagcccctaatttctccatgtttacacttcaatctgcaggcttcttaaagtgacagtatcccttaacctgccaccagtgtccaccctccggcccccgtcttgtaaaaaggggaggagaattagccaaacactgtaagcttttaagaaaaacaaagtttt

SEQ ID NO: 1492 - DNA, 184 bp, Homo sapiens
yattccccaggggaaaaattgaaagtcaaactattcaccaagagaatgcattgtctttgcaaatgagcctaagaatcagactttttataaatacatgttcaagtttcttgtggttctaaatggacactgagaactgaaactgtctacaccaagtttacaatctatattaactatcattwtacag

SEQ ID NO: 1493 - DNA, 273 bp, Homo sapiens
  misc_feature 39: n = A,T,C or G
aggtaawttgtgatatttagtgcacatttacgtgtaggnccrtcttkaatggtaaagacagatacaagcctatggcacacttctccaaagcaagctatacttgagagccaattcccaaataagacagcagagatctgattaaatgcaactgtgcaaacattcaacagacatgttgaatgtaagacaaattatgattactgataatatgcaaatgtggtctataaatttatgaatgtgacttccaaggggaatatggtatggaagcccattttt

SEQ ID NO: 1494 - DNA, 343 bp, Homo sapiens
ttggaaagcctatcactttctctcttcattctccagcccccacaccaagcacacagagcttttcagtgctttactcttaatggagaacataaccagggattatcaggtattccaacatgaaaaagaaagtccaatagaaacaagcaggataatcaaaccaggaggaagcagagactatatagagaaagaaaaaaagacacatgggaataacggcaataatactgacaatacacctcaccataaacttatcagaatgaatttgttggagaaatatatggaggggaggtacttgtgtgtgtgcacaggcactcatgtacacgtgtgtatgtgtatgtttttttaa

SEQ ID NO: 1495 - DNA, 378 bp, Homo sapiens
tagcattcttccagccactctggcgtcactatgtgcttcacgacagaaatcgccgtcaggaacttcacggtgcgagtcactttgctggcaatgaggtgtgtgcacttctgtgcagactccgcaacctctccaccaagaatgtagagcttcttaatatactgttgaacctggacaggctcgaatccagtgaaaagcacaaaaggggtcaattctggagttagctttttagtgggaggtggtacgtcttcaattctggctcttttggaagaaggctggacattagctacttcattctgtttcagtttgggaggtagtcttatactcatcaacaactctgcagacacttttaagggaactctccaagcatctaaaagattt

SEQ ID NO: 1496 - DNA, 181 bp, Homo sapiens
tggagaaggaagttttcctgaagagccagaatccttgctaagtcatttagatccaactgaccatctttatttctgtcaaaaatcttcatcatggtgccagtgtattcttccagtttagcctcagaaatggcctttttgtggtgaagaaagaggtctcggaggaagttgcggagctcagcag

SEQ ID NO: 1497 - DNA, 373 bp, Homo sapiens
tggaagctgatccaccttgagatcaagccggccatccggaaccagatcatccgcgagctgcaggtcctgcacgaatgcaactcgccgtacatcgtgggcttctacggggccttctacagtgacggggagatcagcatttgcatggaacacatggacggcggctccctggaccaggtgctgaaagaggccaagaggattcccgaggagatcctggggaaagtcagcatcgcggttctccggggcttggcgtacctccgagagaagcaccagatcatgcaccgagatgtgaagccctccaacatcctcgtgaactctagaggggagatcaagctgtgtgacttcggggtgagcggccagctcatcgactccatgg

SEQ ID NO: 1498 - DNA, 337 bp, Homo sapiens
gctcttgtagtgcttttcttttaagggagatgtagtaaaagggaaaatgtagctcttagtttacacttcaaagatgtgggggtctttcagagaactaagaataacagttttatgtgcagagagagtttgccagatctgaagcatatacctcattgactaggctgttactttgggataggttgcagtaccagccacagccagcagatagaggaaaagacacacataaactcgcttctgagcgtccacttctgcactctctgctctgctgttactcagcccctgagtctgactcatctctgcacaacctctctgtgccatgaagataagtcttccatgg

SEQ ID NO: 1499 - DNA, 314 bp, Homo sapiens
catgcggagggactttagcatggctgataaggtccttcctaccattccaaaagaacagaggaccagagttgcacactttttggaaaggcagggcttcaagcagcaagctcttacagtatccacagatcctgagcatcgttttgagcttgctcttcagcttggagagttaaaaattgcataccagttagcagtggaagcagagtcagaacagaagtggaaacaacttgctgaacttgccattagtaaatgtcagtttggcctagcccaggagtgcctgcatcatgcacaggattatgggggcctgctgcttttgg

SEQ ID NO: 1500 - DNA, 321 bp, Homo sapiens
cctgaaacctggtgggaagatgattgaaagtgttttagattcaacagattgactatgtatgacttatctattaaaatgaagaacttccatggtttaatagaatgaatgctgtattcaacaaggtcttccatccttcttataaatcttaagactgtgtttaagctttctttcacttttactctatcccttggaagttaattgggaataaaaagatttatcaatttagtcactataatttaaggccaggcatctgcttggaaatacaataaccacaattaatacttagagaaaattgtttcaacagattaactctgctatttt

SEQ ID NO: 1501 - DNA, 557 bp, Homo sapiens
ctgctctggggaaaatggtggaggagccaggcagagaggaggagcagagtgctggcagtggaaagcctagctgagactggagatgcccccctgcccaaagcatctcagcgaggatgcttctccatatgggtgagccagcctagagacagaacaggggaagccagcgggtgctgcagcgacccaccgccccagaacatctgcatcttacatcaacaaaggtttatttctcattaatatccattgtgggttggctgccactctaaccctcgttgcctctccatctgggtcttgggtggcagagcagcctgtctctgtggcagaggaaaagagagcactgggcagcacaggctgactctcaaattttccgcctgaaggtgacccaagtcactgctcacatttcattgactaaagcaaaatcctatgcctgtgggtgagttgagcaacgtgatgaggtgttaacttcctacagggaggggctcaaatattgcccaacagtggtatggcccactgcctggggtggtcggtggaaggctggcaggacaagggagaccacgtgg

SEQ ID NO: 1502 - DNA, 249 bp, Homo sapiens
cctgcggggaggcgcgctgcaagaacctgcccggctcctactcctgcctctgtgacgagggctttgcgtacagctcccaggagaaggcttgccgagatgtggacgagtgtctgcagggccgctgtgagcaggtctgcgtgaactccccagggagctacacctgccactgtgacgggcgtgggggcctcaagctgtcccaggacatggacacctgtgaggacatcttgccgtgcgtgcccttcagcgtgg

SEQ ID NO: 1503 - DNA, 302 bp, Homo sapiens
ccaggacctcttttgggcatttcttcctaagtggaatacacaacagataagggagtaggggaggtaatacagggaagctactctttccagctcagaaggagttgatgaagcccatatatgcattcaagaagcccatgggatcctctagctgtggatagtggctaatgtggtcatccagaatcgacactgtggaccgcggcagcgttttcctgtacagctccaaaaactctggatagggatttacaggatccaatggcccatagataaaatgaatggggatagttacagaggcaagagctccc

SEQ ID NO: 1504 - DNA, 430 bp, Homo sapiens
ccacgatatcaactatttggctttgtcaggtgttctctcaaaaattggcagaagtggtgagaatccgtatgccccgctgaatctcctggctgactttgctggtggtggccttatgtgtgcactgggcattataatggctctttttgaccgcacacgcactggcaagggtcaggtcattgatgcaaatatggtggaaggaacagcatatttaagttcttttctgtggaaaactcagaaattgagtctgtgggaagcacctcgaggacagaacatgttggatggtggagcacctttctatacgacttacaggacagcagatggggaattcatggctgttggagcaatagaaccccagttctacgagctgctgatcaaaggacttggactaaagtctgatgaacttcccaatcagatgagcatggatgattgg

SEQ ID NO: 1505 - DNA, 164 bp, Homo sapiens
ccagtcaccttcaccttctaactaactagcctccggatgaggtggctgccaccaggcccgaatgatccccaggagcccagcttccaaaccccaacatcgaatcaaacatctccatccccaagtgcagtaacacacaaaaaccaaacactctgccctgggaaagg

SEQ ID NO: 1506 - DNA, 189 bp, Homo sapiens; identical to SEQ ID NO: 1413

SEQ ID NO: 1507 - DNA, 268 bp, Homo sapiens
ctgcacagaggggcacggaactccaaatcctggaatgcgggtcaataatgtgaattctggccctgaccgccagacacacagcaagcctgagtcatctgccgtcaccatgtcagccacacaatcctgtccctgggcaggctcggtggcaatgtctgtgattggcatctggtgcccagccagctcctcgctcagtacaatgttgggaccctttgctgggatgtcaaacaccagcacccggcctgaccacgttcccacacagatgaagtgg

SEQ ID NO: 1508 - DNA, 159 bp, Homo sapiens; identical to SEQ ID NO: 1342

SEQ ID NO: 1509 - DNA, 234 bp, Homo sapiens
ccattgtggagtacattatgaacacaatgtgcttgykaagtcttctctctcattttcagacagcaattgttaagagtcacacacacgtcccagacctaagcagcaactccagtgaatggtactcagacacactcacgggacagcacagaacttgattcttctttgtctgttgcccaaagaacctgttctttgagtctgttccaggtgacttgtaatgatacctcttacggtttt

SEQ ID NO: 1510 - DNA, 437 bp, Homo sapiens
aaagcagtacatcttaatatgaagacaggaatttctatgatgcttacgaacattagactcaacatttttgcagccccctttcctggtctacattcacacaaacatgagacacagtcccaagggagaaacagatgctggaggagcatttagggccagagtggaggcacagaggaagctgggatttttcaactaccccctccttggttactcctgggattcccttaggatttcacggcacaaccagcgaagagtttgctcagattcacttcggagtagccacttcgggacaagaattgctctgctgtgttcttgagttttctgtagtcctgcagaactttgggggtaaaaaattgcttcttcaatttatctttctcatgatcggtagtaagtttctccagtgcacactccgcatcaaaaatgtaccggtaaaagcacag

SEQ ID NO: 1511 - DNA, 94 bp, Homo sapiens
tgtgaagatggagtctgaggggggtgcagatgactctgctgaggagggggacctactggatgatgatgataatgaagatcggggggatgaccag

SEQ ID NO: 1512 - DNA, 493 bp, Homo sapiens
aaaaatatgcattacaactggagttttccactgagaataagagtttggttttgacctcmcataaatccaagggttcttgaaaaaaaagttaatataaattctcaataactatatcattaataccttatgtatacataggagtttatataatgcatttaagtaacaaagaatgtaacatttattagccaccaagtaattaggagatagcatcaattatattgaaagaagatgagtttagatgcttatagtcaagggagttaattgaaattgaaagctattgtaggtggttactactattattatcaaacctgaaagttggaacatgtgaacttgatcctttgcacacataaaagttcacaaagctgcttttaatttgcctttgttctgtagtactgcttggtgaatcatgcactagtttgttgtaaaattcatgtaaacttttatgtatacaaatgtcagatcaagcacaggttttattaattatatatatttt

SEQ ID NO: 1513 - DNA, 510 bp, Homo sapiens
aaatgaggattattgatagtactcttggtttttataccattcagatcactgaatttataaagtacccatctagtacttgaaaaagtaaagtgttctgccagatcttaggtatagaggaccctaacacagtatatcccaagtgcactttctaatgtttctgggtcctgaagaattaagatacaaattaattttactccataaacagactgttaattataggagccttaatttttttttcatagagatttgtctaattgcatctcaaaattattctgccctccttaatttgggaaggtttgtgttttctctggaatggtacatgtcttccatgtatcttttgaactggcaattgtctatttatcttttatttttttaagtcagtatggtctaacactggcatgttcagagccacattatttctagtccaaaattacaagtaatcaagggtcattatgggttaggcattaatgtttctatctgattttgtgcaaaagcttcaaattaaaacag

SEQ ID NO: 1514 - DNA, 511 bp, Homo sapiens
  misc_feature 472: n = A,T,C or G
ctggagatcaggaatagaacctttccaagatatcataatattttctttataggaacactgagtaatggcaagaatattttgagcttttccatggttaagagcgatagtctcagaggctggagaaaatgttcattctgctcagtgatccaggagtgtgaggacagtagcttcctttccacgtccacaagacaatgacagatgtgtttccttctttgccctttctagggatctttctagggatgttgattctctcacaatatttcaatgtcccatttctgtgtttcttctccctccaggggctgatttacgattacatgagtcttgtcacaataatttcctcctttaacatcaaggacaagttgatcactgagataagagctgatagttccatttttattcagtctccacttctgcctgaattgcccatgttcagtccatagagctactttagctccaggtgtggtcccggccnccatcacatcaagaactggtttcactgggccttggatta

SEQ ID NO: 1515 - DNA, 176 bp, Homo sapiens
aaaggggaaggkgaracttaaaagtattcccaactagattatctacaccaatacattggaactctatattttgctttcattttgtcttaaaaaaatgaaatagcaacgctctatcagtcacacagaggacatgcaratttagcagtattgatattatactctatcttgttggattt

SEQ ID NO: 1516 - DNA, 309 bp, Homo sapiens
ctggggaaaaccgtgcattacctgcccatcctgttcatcgaccagctcagcaaccgcgtgaaggacctgatggtcataaaccgctccaccaccgagctgcccctcaccgtgtcctacgacaaggtctcactggggcggctgcgcttctggatccacatgcaggacaccgtgtactccctgcagcagttcgggttttcagagaaagatgctgatgaggtgaaaggaatttttgtagataccaacttatacttcctggcgctgaccttctttgtcgcagcgttccatcttctctttgatttcctggccttt

SEQ ID NO: 1517 - DNA, 182 bp, Homo sapiens
ccaacatctaatttttttactttttaattatagctgttgtgactgatgtgagatggcatcttactgtggtttttgcttgcatttatttatttgatgattagtaaggatgagtgttttttcatatacttgagtgtcttcttttgagaaaatatctgttcatgtcctttgccttttcttgattt

SEQ ID NO: 1518 - DNA, 548 bp, Homo sapiens
cctgagggagagggaaaagcggatacccacctgtgtcgctgtttgcgtgccaagtccaggaacagtccatacagccctgctgcatcccacgacgctgtcacaaagcaggagttcatccgaggccaaggtgttgtcatgagaatattcgttaaagtagggacgctgactttgttcttgggcagattctcttcctgtggagtatccagcctgtttgcctagttttcctgttcttctggggtctgatctctatctgttttactgcagtccagttaccaaagtggtataagtaaaattgaaagaattctaaataccttttccccccacgttagctgcctcacgttaatgtggtcttacggtctgcaaataagtgttttgatgatttggcgactgcagttacccatactagctctcctaccactcactactgacagttaattattatcgaatatccacccacccagggtgagttataagttataccaggtgttttggttaataatactaatgcaattaatttactggttactctctcatcttaaagtaatcag

SEQ ID NO: 1519 - DNA, 491 bp, Homo sapiens
ctggtgaaggacggcttcctggtggaagtgtcagagagctcccggaagctgcggcacgtcttcctctttacagatgtcctactgtgtgccaagctgaagaagacctctgcagggaagcaccagcagtatgactgtaagtggtacatccccctggccgacctggtgtttccatcccccgaggaatctgaggccagcccccaggtgcaccccttcccagaccatgagctggaggacatgaagatgaagatctctgccctcaagagtgaaatccagaaggagaaagccaacaaaggccagagccgggccatcgagcgcctgaagaagaagatgtttgagaatgagttcctgctgctgctcaactcccccacaatcccgttcaggatccacaatcggaatggaaagagttacctgttcctacttgtcctcggactacgagaggtcagagtgggagagaagcaatttcagaaactacagaagaaaggatcttcagg

SEQ ID NO: 1520 - DNA, 169 bp, Homo sapiens
ctggtactgtcgatttggaaagctggctggaaaaaacttattcatgaaggggctgatggtgtgggacagggccaggattcccagcacgaagaaatacatggacagcaggaggttgatgtactcctgggagaatattttgaaaaagaggtagagccccaagagtgtgcag

SEQ ID NO: 1521 - DNA, 293 bp, Homo sapiens
aggacgacgctgtcrgargcagggagagcaaattaccacagcttcttggcccagttctgcccttctttgctttgggattgcactgggccatcagctcatgccaggctatgggggcagccagttggcattgctccccagactgaacagaaacctggccgccggatgggacctcctttggcacagacttgactgtgtaactgcataaactgcagtagcatcattgccctagatgccccaggagacctggcaccatgaggattacagacagtggaatcttactgtcatctggacag

SEQ ID NO: 1522 - DNA, 386 bp, Homo sapiens
ccacgtgggactttgaagacagcacaacacagtccttccgctggcatccgctccgggccaaggcggagaaatacgaagacagcgttcctcagagtaatggagagctcacagtccgggctaagctggttctcccttcacggcccagaaaactccaagaggctcaagaagggacagatcagccatcacttcatggtcaactttgtttggtagtgctaggagccaagaatttacctgtgcggccagatggcaccttgaactcatttgttaagggctgtctcactctgccagaccaacaaaaactgagactgaagtcgccagtcctgaggaagcaggcttgcccccagtggaaacactcatttgtcttcagtggcgtaaccccagctcag

SEQ ID NO: 1523 - DNA, 178 bp, Homo sapiens
aaaaagcctatcccatactgaattgtgggaacctatgaagtgtctcttaatgtcaattaaaagtaacagtggctgcagatattgatttctgaaagtacatgagaatttgtctctaactatggttgaaacaacaaaaccaaatctgaatcaggtagaggtctaccagacacaaactctg

SEQ ID NO: 1524 - DNA, 319 bp, Homo sapiens
wycacagcwgaaatggggcactgaagtgtggagscacakaatgcgggagggcagaaccacagacaggaggctgagattgacctcctgagtgcaagctggtctccccttcacctcctgcaccctacgcagatggtgcttaccataggattgccgtaaaacagagacacgcaccagcgagaaactttagcccttagtatcccatcctcaggacagaatcactcttaaacatgttgaaatacatctgcttagagcttttctatgtgtctatataatgtatgcataatatacaattagaagcatgtgattttataacattttt

SEQ ID NO: 1525 - DNA, 467 bp, Homo sapiens
ccagactagacagagatcaggtcatcaggggagcttccgagcttcagcaaagcccacaggtagctctgcgaactcagaatgctaccctaccttccctgcaggccgctgttcatgtctggactcctgggggcgctatttaatgtttacccccatctccagtgccccctccaaggctgtgcagtgtcttggggctctcagggccaacatcgaagagatgggggccacctcttaacacctggcaacagtctcccctcatcctgattcctgacaacagacaaaacaccggtttctagggtttatctgtttgttttttgagttgagggttcctcagggccttggcattgctagtgatggtcccctttgctgtgtgagaaccccctcaaccccttcctcctccctctggggatgaagtgggagtatttggctccccatttttgacaaaagggctcagtgcagggaggtggagg

SEQ ID NO: 1526 - DNA, 439 bp, Homo sapiens
aaactgtttactggagaaaatcctcgctcatgtccatttattgtttttttctgtactgtgatttgtttcaagcttaggaaaactagtatattagagtatgttctaggaaattaaaagatctggttagagtaaaaagttctttttaaggttcttaactaattttttcacaactaagaaaataaatgaagtattcttaggctgaaattcatcttattttatcataaattagattgtaggggcagcctacatttttgtgtatgtgtttttatttcttaaatgattgtgtgagcctggtgacattttatggttcttgtgatctaaactgtttttccaattcacatcttttgtcgtgaagtgatattatactagagtactgtttgcattgtaaaaatgctttgctggtgctctggcattttgtctttatctcatcacctaattt

SEQ ID NO: 1527 - DNA, 609 bp, Homo sapiens
  misc_feature 582: n = A,T,C or G
ctggagaacttgggctccattaggtgcaatcgttggagtaattagcccatcttttacatttcttgccacaaaatctcgaagagctgccatttcaggttcggacagtgaatacacatgtccactgggaatactgtgtgctccaggtatcatttctatgtgagggtcaaccaggcggtgatctgggtagacgtgctcatctactggagtgtacacattctggacatagtaatacctcactggttggtaaactctgtatccatctactggataatagagtggcggttgtggtgctggtggtgggagcgatggtggtattggagaatacatccggcagtggtagcggcagtattcagaatcaaagacgatagatcgagtgctccatgtgatattgggatcatgtgtgctcagccagcgaacccctaggacgacagggaagaatggagactgagtcacatcaaatgacagcacctctcggtgatctcccaggtcaactatcaggtcgtgagtttcgtggacaactgggcccgatgctatggggcgcccatcaattgcttccacaagtattggacccgcccgggcggncgctcgcaagggccgaaattccagcac

SEQ ID NO: 1528 - DNA, 393 bp, Homo sapiens
tgatgtaatgaattcatatttattgatacagaaaaatatgatataatccatctaaaaagcaagttacaaaacagtgtacagtgtaccatagtacctatgaacacaattagtgaagtaatttgcagagctataataccaaatcagaaattattttggtaatgaatttatgattttcctcgttttctgattttttccatgatctcatatactttattctcagaaaacaaaagacaaaaccccacacatacacaaaaataaacgagtaacttctttacaaccccagaggctaagtcagtgggaaaagagggaaatgaatggttatgagcataaacacagggacaaataaaagaagtttggagcacagagaacaattcacaaatcagaagtcatttt

SEQ ID NO: 1529 - DNA, 143 bp, Homo sapiens
atccgatagaatccagttcaatgaccttcagtctttactctgtgcaactcttcagaatgttcttcggaaagtgcaacatcaagatgctttgcagatctctgatgtggttatggcctccctgttaaggatgttccaaagcacag

SEQ ID NO: 1530 - DNA, 636 bp, Homo sapiens
  misc_feature 330, 504, 583, 591, 625: n = A,T,C or G
gtggagaagcggcttggtcgggggtggtctcgtggggtcctgcctgtttagtcgctttcagggttcttgagccccttcacgaccgtcaccatggaagtgtcaccattgcagcctgtaaatgaaaatatgcaagtcaacaaaataaagaaaaatgaagatgctaagaaaagactgtctgttgaaagaatctatcaaaagaaaacacaattggaacatattttgctccgcccagacacctacattggttctgtggaattagtgacccagcaaatgtgggtttacgatgaagatgttggcattaactatagggaagtcacttttgttcctggnttgtacaaaatctttgatgagattctagttaatgctgcggacaacaaacaaagggacccaaaaatgtcttgtattagagtccaattgatccggaaaacaatttaattagtatatggaataatggaaaaggtattcctgttgttgaacacaaagctgaaaagatgtatgtcccmnctctcatatttggacagctcctaacttctagtaactatgatgatgatgaaaagaaagggacaggtggtcsaaatggctnttgagccnaattgtgtaacatattcagtacccaatttactgngggaaacagcc

SEQ ID NO: 1531 - DNA, 194 bp, Homo sapiens
aaaaggcagagcattcttttttcggcaattttgataagcaaggtgtagatttacatttttgtccttgctcccaacgaaatggataaacaaaaataacttaccatctactcatggaatgttgttgtgttagccagtctgaaggcccaccttaatttttatataactgtctttagctcttcttttgacagggcagg

SEQ ID NO: 1532 - DNA, 300 bp, Homo sapiens
ccatacaaggtaattttgacaggttcctgggattaggacatgggcatcttgggaggccactactggcctaccacaactgggcagcaaaactattacaccctccggtataatagttttggtgtttcaatgactgggaggaaaagggttggaattttttgctttggggtccctcttaaccttgtatttttaaggtctgggactcaccaaccctccccttccaaccagagaaactcactgcagtatctccttgaaagtctggtgacgagtctgtctaagtgctggtgagaggcacaggaccaa

SEQ ID NO: 1533 - DNA, 521 bp, Homo sapiens
gttcctttgcaccctgtagatgttctaggatagttgatgcatgttactaaattacgtatgcaagtctgtgagtgcgtctgaggggacatcgccaaggactgactgagacacgatgccgagacctcaagccctgaggggcagtcccaaaacccttacagtgaagatgtttactcattgcccccacctctggtccacactagaaagaagctcgccccacctccacctgtgagatccgtgaattctcggaatggcaggggaagccttgcactaggttgcagagaagcatcctccacatcctgtgtcagaaaccctggtctccgtggcacttgtaactcaccgtgctgtcttctggtctgtgtgtgttcttcaagccagctctaggcttcaggccgagccaggttcacactcagaaagatgtctccccatccccattcggggctgacgatggggggctgatggctgcccctgcgtggcctgagtcctggtccctctgaggcagttgacggggcagtcagattttt

SEQ ID NO: 1534 - DNA, 181 bp, Homo sapiens
actcaagaagatgtatttaatgcttgacaataagagaaaggaagtagttcacaaaataatagagttgctgaatgtcactgaacttacccagaatgccctgattaatgatgaactagtggagtggaagcggagacagcagagcgcctgtattggggggccgcccaatgcttgcttggatcag

SEQ ID NO: 1535 - DNA, 544 bp, Homo sapiens
aaaataggacactaaatcctactctgaaaggtggtttgatcaggactaaagagaatgtatgtagagtgctttgtgcaacgaattgtggggagcttggacccaataaggtagccagaattacccacaccatcatcatcttcaccaccatcattattgttatcgacatattccaatacacttctgaagggctggaagagagaaatatgtttgtgcagacaggcggcagcagtatttgatccaccaccacagctccaccgcttgggggcagtactgatccacctgtgctcccctccctgccccagcctggaaagctaatttcagactcaaaaaaatcaagtacagagcagcgcacccactccaatgagtcatccccgcccactctagacaacagcatgctcatgactcaaactatcttcgtgaatggttcaaaatatcaagaattggtttccatagtttcttgactaaccagacacaaaatttcccctacatgcagagattcatgtctcaacttcaactgtacattaaactcaaccgggaaactttt

SEQ ID NO: 1536 - DNA, 591 bp, Homo sapiens
ctgagttaagatggtaaagccaatattattttaggaggaaagaggacgaaggccaatgaaccaacatctgcctgctatctggtgcatcacccaaggtgaccaatggctgggcacaaataaacttctcttttgctagccacagagttgctcactgtggcaagcctgagctggtcagaacacctgtgtgtgtgttcctgatacacactaaccacaataagcaagtctgcacacatctctatgagccccatgcaaagacaagacattcccaaagatcagtcactagagtgcaacaacgaaattcaagatttgaccaaaacagaccctgctgcctcctaaattgccaattgcctctcaaaaacttacagaaaaagggacattataagaattcatagagggagagaagaaaaagctgctactcctagtcattagtacaatgtgctgtgttaattagatacctctatataaattagaaaaagtgctttacttgcatgcttcaataaaatgaatactgagtgtcgtagtgttagatctgtacagatataaattttttgcagctatataaaagtgtataagatgggcttttgccatttt

SEQ ID NO: 1537 - DNA, 341 bp, Homo sapiens
acttcgggcctccctctccctgtgcagaccggttgaataaatgataaaattactgtttgtgtcctctgtgaagtctggattaatggaaaaaaggatttgtgaggctagtcttaggctgtagccaatctggtgtgctttttgtgtcttcctgtatggttccatgataaggaggaataccttaggatagaatgcaagcctaggaccccataagcctgttgttcaagccaaccagcaaactgggcagtaacaaacattgctgcaggtttccattttgttttacgtccttgggagcttgaccttgtaaccacgtggcagtaccttcttttggcctctgccatttt

SEQ ID NO: 1538 - DNA, 363 bp, Homo sapiens
ggacctgactttgagtccatcagagacaaagtgagtgagatgcacatacagtgtttccagacctgactcagcccatctgtctgttaggaaactttatgaagacgccccccagaattaaaccctaattcaaatgtctcactctgaatagagaccttctgaaataatcttggtatagagacccagacacgtgccttttgccttaaaataaaaatatttagcccatgttgttttatgtatctgtctttcagttagttttgaaggcccgcacggaaaagtggggcctgtgcacctgaaaagaaatgtgtatgttatgtggttgttggtctttcctactagagttatcttgataattgtgaagagtgg

SEQ ID NO: 1539 - DNA, 371 bp, Homo sapiens
ctgtgggggtccttccagagaggagctgagatacgcctacctggaggggcccctgggcctggaggggctcctcagtgtgactgggtgaagtgttttcagaggaccagggttgaggttgggggcatctcatccagaccctgccggcatctgccccagaacccaagggcccctccttcctccctcctcaatggaaatgctggagatgtcctcagtcaccctctgagcactcacacatcaccccttatttggaaatttttctcactctaaccttccttcctgctgcaccttctgccccatccccaggctctggcctctctctctcctcttctaccctttagcaggtaatgactcagttcccactgaggagccag

SEQ ID NO: 1540 - DNA, 403 bp, Homo sapiens
ctkgacgtgatggagcaggtgagcagtgcccgtggggcttgccagagggctgaggaggaccctctctaaccagctccctgtcccccttcttctgtagcttgagttgaagaagacactgctggacaggatggttcacctgctgagtcgaggttatgtacttcctgttgtcagttacatccgaaagtgtctggagaagctggacactgacatttcactcattcgctattttgtcactgaggtcagcaatgcaccgttggtttcatgtttcatactgtttacactagcactgccctttttggcttaatttagttcattttgtacctaactgagaactgtgctttctgatgtagtgatgacaatgacagatactcgtttaccaaaaagcaccttctgcctgcagcag

SEQ ID NO: 1541 - DNA, 428 bp, Homo sapiens
taaaacaaaactaaagaagagaaaatatattctcgtaaattatctgaacttaaaagatggaagcctggagatagatttgtgataagccattgctgagtacatcctagagttcttgataatttcagttggttaaattacaatagtttgctatttcctccctcacattttatgttctacagtatctagctgcttgggttttcctgtataccatggggcttctgtcatctgggctttactcagtggcatattccctctgcctaaaactctcctcccctctccaccttagaagtagcttttcctagaacggttttcccagggtttcacctaaggtgatagtacaatctacagggacctgcacatgaagacctttgcatacatgccaggaagttggactttatctttggaaaaagggagcctttgaaggtttt

SEQ ID NO: 1542 - DNA, 345 bp, Homo sapiens
awttaaatgcttagcaagcagcaattccacgatggtcaaattcctaatatgagagaagtagaaataggaaaaataggtcaccctgatacttatgttttcattttgcttaatatacgtttgtatatttcaatataacattaatagatatcgtgtcccttcacagttctaaagtagtaagcaaaatgaattaatttaacctatgcaattaaaaccaatttggaagaatattgaggtagcacactgttacgggaattagtatgactcagtaatgcagttgaaagttagtggctcctaatccagtatgaatcatggagatgagagaaatgattagataaagagatattt

SEQ ID NO: 1543 - DNA, 420 bp, Homo sapiens
aatattgaatttctagaagcagtatattgcttactgcttcttaattacgttatagatgaggtggaaatgataaaaactaaagaagcaagattaatctttaacacacatttcaggctgttgtaaaagaataaacaatgcttcatataaacttctagcaaatgacttcctaatgaggtcttgaaacagtctttagggcacggaatgtcatcacataattaagcagctttaagcctttattaaaaggcttaaagtcgcaaacaatgaaatctgaaacaaactgtaccatattaaactttttgatgatatttcaaattcagtaaaagaaaaaaaggatggttcagaataacatcacgtattctaatcctgaaacacataacaaatgcatctgaaacagcaattcttaaaaaggttttgcccttt

SEQ ID NO: 1544 - DNA, 306 bp, Homo sapiens
ctggcttcactcctactccctctctgctcgcagcacgtcggccgccagctctttgatgtgttcccaggcccgctgcacatgggcagattccaccgtgcgagaacagatggcaaagcgcaggacaaacttgtccctgaggtgacatggaaccaagtggatttttttggcactgtttattctttgcagaagagcttcattcactttgttggaaccctttagccgaaagcagacaagccccagaatgacttccacacagatttcaaagcggggatcctggcgcaccagtgactcaaactcatgggacag

SEQ ID NO: 1545 - DNA, 110 bp, Homo sapiens
ctgctccgggccttcatcctgaagatcagcgtgtgcgatgccgtcctggaccacaaccccccaggctgtaccttcacagtcctggtgcacacgagagaagccgccactcg

SEQ ID NO: 1546 - DNA, 239 bp, Homo sapiens
aaagaaatatgacacggtgttggatattctaagagacttttttgaactcagacttaaatattatggattaagaaaagaatggctcctaggaatgcttggtgctgaatctgctaaactgaataatcaggctcgctttatcttagagaaaatagatggcaaaataatcattgaaaataagcctaagaaagaattaattaaagttctgattcagaggggatatgattcggatcctgtgaagg

SEQ ID NO: 1547 - DNA, 527 bp, Homo sapiens
aaaaattccagttgagatttttctggttctctgtataaagattgactggaacatatacattttggggtttatgtttggagactttggctcttattcaaaccttccattttagttggcttcttctgacagtgcttcagcatggaagcaaggagggggcctcattactgccaggtaagggtaaaaatctagtttctctgctgggtctccattgtcactaagaaaggaatggctctgttattgctgggcagggttggctgttccaactgataatcctatgtctgggagggctaggagtgcctccttgctgttcctcttgttgtttccactgacagtggagtggccttgttactgctgggtggtggttgagagttctggctctctactagggaggacacaacctcagtgtagagaggcggggataccttgttactgtcaggcacaggcggaggtccagtctccttactccacctacccaacagggtagcttgaggcacttcattattgcctagtgagagtggaagtttagg

SEQ ID NO: 1548 - DNA, 333 bp, Homo sapiens
ctgtgggcggagctagtaggggcggggctacgtgattgacacttctctcctcagacttcaagggctaccactggacccttcccctgtcttgaaccctgagccggcaccatgcacggacgcctgaaggtgaagacgtcagaagagcaggcggaggccaaaaggctagagcgagagcagaagctgaagctataccagtcagccacccaggccgtattccagaagcgccaggctggtgagctggatgagtccgtgctggaactgacaagccagattctgggagccaaccctgattttgccaccctctggaactgccgacgagaggtgctccagcag

SEQ ID NO: 1549 - DNA, 438 bp, Homo sapiens
ttgacagtgtacgctggagcaggttccagggtggggctgccctgccgcctgcctgctggtgtggggacccggtctttcctcactgccaagtggactcctcctgggggaggccctgacctcctggtgactggagacaatggcgactttacccttcgactagaggatgtgagccaggcccaggctgggacctacacctgccatatccatctgcaggaacagcagctcaatgccactgtcacattggcaatcatcacagtgactcccaaatcctttgggtcacctggatccctggggaagctgctttgtgaggtgactccagtatctggacaagaacgctttgtgtggagctctctggacaccccatcccagaggagtttctcaggaccttggctggaggcacaggaggcccagctcctttcccagccttggcaatgccag

SEQ ID NO: 1550 - DNA, 204 bp, Homo sapiens
aaaactaagttattccaacactaaaagcatacaacagcatgccaacagtaatatattattctccaagactttacctatgtaagtgttcaaaactctgcagcattaaacaacgtgtatgcaaattgttatggatacatttcagaatctaagaaatcaggcaagtgcttaaaaggccaacggtccaagggattacatctgcagttt

SEQ ID NO: 1551 - DNA, 132 bp, Homo sapiens
ccatctgtggatttgtctgtgcacctattggctcttctagctgactcttctggttgggcttagagtctgcctgtttctgctagctccgtgtttagtccacttgggtcatcagctctgccaagctgagcctgg

SEQ ID NO: 1552 - DNA, 433 bp, Homo sapiens
ctgaatagaggtcaacacagttgcgatgttgagggatggtctccaagcaccttttggtggcaatttgagaacatccagacaaatccttccagcagaatcaatgtttggatgataaattggagtgagaaatcggatctgaggaggttcaaatgggtacctctcaggaatgataacttctagcttaaaaacacctttctcataaggtgtgttggctccacctaatatttgagctcgcaggtcatccatttggtctttatcttgccaacatgtgatgcctgggggtggctctgtggctaacatgtgcagctctctcttcagacgtgaagctctctgcatgatccccaagtagaaggaaccacacacagttcactgctccacactaagagctgsctgggatgcactgagctgacacccctcacaacgcagcaacgcg

SEQ ID NO: 1553 - DNA, 316 bp, Homo sapiens
gagcaaggtctgctgagaacagacccagtccctgaggaaggagaagatgttgctgccacgatcagtgccacagagaccctctcggaagaggagcaggaagagctaagaagagaacttgcaaaggtagaagaagaaatccagactctgtctcaagtgttagcagcaaaagagaagcatctagcagagatcaagcggaaacttggaatcaattctctacaggaactaaaacagaacattgccaaagggtggcaagacgtgacagcaacatctgcttacaagaagacatctgaaaccttatcccaggctggacagaagg

SEQ ID NO: 1554 - DNA, 542 bp, Homo sapiens
  misc_feature 517, 532: n = A,T,C or G
aaaggaattattctggcagcacatgtagtattcttggatgatcttgctgctcttatttctccttttgtgtgtgtgtgtgtgtgtgtggctatgggttttcatttgtaactccatctgcttargagagtgggctctctataagggaacctgctgtaaacttcattgcagcaaggatgtagagagaaataggacttaattccactaggggctctcatctcacaccttaaggaggagatttctagaaaaactgggccagattttctttgytctccatcattttaatgtggcaggctgytcagttttcttactcttacctatgwgatatttcttcgtaacgtgtccaaaaagaaaaaagacccaatcagtgtctcttgactttgttctttgatccctcagtttcttcttgatttcagcatgtgtccgggttcctaattttgggtatgagttagcaaatttaaccattgtgtttgtgccctacccaggggactccccagtttctgacttgaagtagactganaagaatccacgaggngctattttgg

SEQ ID NO: 1555 - DNA, 117 bp, Homo sapiens
ctgtctgtggcttcccatgtctttctccaaagttatccagagggttgtgattttgtctgcttagtatctcatcaacaaagaaatattatttgctaattaaaaagttaatcttcatgg

SEQ ID NO: 1556 - DNA, 111 bp, Homo sapiens
ctgctgcagccgcagtttctcatccggagtgtaccccgtcatgtcgccgctggtaccaacgcaaaaggacacggcgcaccctcgaactacggactagttacttaagcgcgc

SEQ ID NO: 1557 - DNA, 454 bp, Homo sapiens
cgaggactgatcctctagtactaagtgactggggatattacaytarccaacattggttgatacatacctkartmatcatwtgaggaygcagtgataarsgsatawwmywgtatsatccyaacaygyactarctcaaaaactagtgggggcggattgatctcctgtgggacwkcacatgscctgaaagtgaacatgmtcmtratcacctgcagrgcttgagatggyccmcatkgcwgcactccgccccyacaktttttgawtcwacwggagttaggswgmtyctwgawttakcctttctacctgcctccygakagrwgcwcwygastwggakgaatssattgackkctaagrttakacttccactaactctgtacgmtgarctcttactaatattcgttaccacgctaagaggctctgctccaggatctcatcgcgactggaaggaacctccagc

SEQ ID NO: 1558 - DNA, 404 bp, Homo sapiens
aaagaagtgcagttgatatctaatttacacagtgaaactagtgatagaaaataactaatgaaaaaaaatcagagactggtttccaattgattgacacctagatctgtcagcctctcttaaagaaaggggaaggagaaaaaaaatctcatcatggaaggcagacaagagtccacctgacagaggtggaatctgatggaatctgaccccatttcatgataaacgagaggaaacataaatgccatctcaaatactaaagcgatgtagtgtagcatgagtgactcaatgcaaattcacagaggaaaagaagttacggcttaggaagtaggacaataaatacaaatatttcatcttatttaatggtgcatgacttcagtgaaactaccctttgcaatgcaataaatttt

SEQ ID NO: 1559 - DNA, 266 bp, Homo sapiens
aaactatcagaagagatgagagggaattgatctacaatactagaattttatgtgcagacaaatccacatctggaaatgaaatcacagtaagatattttcgggagaccaaaacataaaaattgctagaataaatttgccacgaacgagtaactagacattagaaattgactacatagatatagtaatactaaaagtgctgaaaacaagcaaacacaacacacacattctcaattctttttttttctatcaaatatcttcaacttttt

SEQ ID NO: 1560 - DNA, 142 bp, Homo sapiens
aaaactcagtatcttctgaaccagaggcatttctgattagcccttccctacctattttcctagtatcactctttaatcagcttggggaggtggcagcatttcatggcctccgtagtaactcacaatgcttcctggggtattt

SEQ ID NO: 1561 - DNA, 381 bp, Homo sapiens
aaacactaaatgaagcttctcacaatttctaattataaacaaaaggctgaaaacagtatgggaaacaaagtttcaaaacaaagaaaagttgagtaaaaggtgccccctctatggctcatctgaaagaaacattttactcagagaggcaaacatttctgatctaggagtaagtttcccactcactttgcaaggacccactcattctgcagaaagacctacaagtctttctggtctcaattgcaaagtacgtgaaaatgtgtatgaaagatctaaaagctaaatattagaataaggctaattgaaatcaaaattgtgtgctggtctaaatatacatcttcggcttcttcctttttagtaagtatttttatttcagatgtattt

SEQ ID NO: 1562 - DNA, 368 bp, Homo sapiens
ggagaaaggagaaccgtacatgagcattcagcctgctgaagatccagatgattatgatgatggcttttcaatgaagcatacagccaccgcccgtttccagagaaaccaccgcctcatcagtgaaattcttagtgagagtgtggtgccagacgttcggtcagttgtcacaacagctagaatgcaggtcctcaaacggcaggtccagtccttaatggttcatcagcgaaaactagaagctgaacttcttcaaatagaggaacgacaccaggagaagaagaggaaattcctggaaagcacagattcatttaacaatgaacttaaaaggttgtgcggtctgaaagtagaagtggatatggagaaaattgcag

SEQ ID NO: 1563 - DNA, 411 bp, Homo sapiens
  misc_feature 32, 332, 333, 346, 361, 381: n = A,T,C or G
accwtrsaactgcawttattacctatgctagntttggataagaamtgkycwtayatgtgakagcaagagggcacyarawswrcttsaacaccaawgggcmktactwtatakawmcgawgggcatgctwtmatgaccaactgrmtgactgtttgagaatggacaargtgctagcgctaaacctgtccttcttgaacrtggcttgactaacgkcwttgatacgttrccttcakkasaatactattactasactttgktgcttgattaccgactggtgcactcttgmtctcacctatgargacagtgctttacacaaactcrtakggaaaattgnntttgtmctgtganctactcatcygaganctccctaagggctaacattncatgtttccgtctcactagctacacgttct

SEQ ID NO: 1564 - DNA, 602 bp, Homo sapiens
  misc_feature 597, 598: n = A,T,C or G
ctagttttaagatcagagttcactttctttggactctgcctatattttcttacctgaacttttgcaagttttcaggtaaacctcagctcaggactgctatttagctcctcttaagaagattaaaagagaaaaaaaaaggcccttttaaaaatagtatacacttattttaagtgaaaagcagagaattttatttatagctaattttagctatctgtaaccaagatggatgcaaagaggctagtgcctcagagagaactgtacggggtttgtgactggaaaaagttacgttcccattctaattaatgccctttcttatttaaaaacaaaaccaaatgatatctaagtagttctcagcaataataataatgacgataatacttcttttccacatctcattgtcactgacatttaatggtactgtatattacttaatttattgaagattattatttatgtcttattaggacactatggttataaactgtgtttaagcctacaatcattgatttttttttgttatgtcacaatcagtatattttctttggggttacctctctgaatattatgtaaacaatccaaagaaatgattgtattaannattt

SEQ ID NO: 1565 - DNA, 473 bp, Homo sapiens
  misc_feature 214, 291, 295, 345, 375, 442: n = A,T,C or G
ctagtccagtgtggtggaattcatccagggggctacccctggctctctgttgccagtggtcatcatcgcagtgggtgtcttcctcttcctggtggcttttgtgggctgctgcggggcctgcaaggagaactattgtcttatgatcacgtttgccatctttctgtctcttatcatgttggtggaggtggccgcagccattgctggctatgtgttnagagataaggtgatgtcagagtttaataacaacttccggcagcagatggagaattacccgaaaaacaaccacactgnttcnatcctggacaggatgcaggcagattttaagtgctgtggggctgctaactncacagattgggagaaaatcccttccatgtngaagaaccgagtccccgactcctgctgcattaatgttactgtgggctgtgggattaatttcaacganaaggcgatccataaggagggctgtgtggaga

SEQ ID NO: 1566 - DNA, 53 bp, Homo sapiens
  misc_feature 15, 24, 28: n = A,T,C or G
ctagttattaatagnaatcaattncggngtcattagttcatagcccatatatg

SEQ ID NO: 1567 - DNA, 136 bp, Homo sapiens
  misc_feature 91, 104, 117, 126: n = A,T,C or G
ttattgatttttttttttcactttccccatcacactcacacgcacgctcacactttttatttgccataatgaaccgtccagcccctgtggngatctcctatganaacatgcgttttntgataactnacaaccctac

SEQ ID NO: 1568 - DNA, 192 bp, Homo sapiens
  misc_feature 4, 16, 17, 48, 52, 57, 82, 91, 98, 109, 123, 151, 155, 162,166, 168: n = A,T,C or G
ttgngtctgtgtgagnnggttgaccttcctccatcccctggtccttcncttnccttnccgaggcacagagagacagggcagnatccacgtncccattntggaggcaganaaaagagaaagtgntttatatacggtacttatttaatatccntttntaattanaaantnaaacagttaatttaattaaagagt

SEQ ID NO: 1569 - DNA, 575 bp, Homo sapiens
  misc_feature 358, 505, 511, 513, 547: n = A,T,C or G
ctagttctgtccccccaggagacctggttgtgtctgtgtgagtggttgaccttcctccatcccctggtccttcccttcccttcccgaggcacagagagacagggcaggatccacgtgcccattgtggaggcagagaaaagagaaagtgttttatatacggtacttatttaatatccctttttaattagaaattaaaacagttaatttaattaaagagtagggttttttttcagtattcttggttaatatttaatttcaactatttatgagatgtatcttttgctctctcttgctctcttatttgtaccggtttttgtatataaaattcatgtttccaatctctctctccctgatcggngacagtcactagcttatcttgaacagatatttaattttgctaacactcagctctgccctccccgatcccctggctccccagcacacattcctttgaaataaggtttcaatatacatctacatactatatatatatttggcaacttgnatttgngngtatatatatatatatatgtttatgtatatatgngattctgataaaatagacattgctattc

SEQ ID NO: 1570 - DNA, 392 bp, Homo sapiens
  misc_feature 10, 114, 374: n = A,T,C or G
ctagtccagngtggtggaattccgccgccatcatgggtcgcatgcatgctcccgggaagggcctgtcccagtcggctttaccctatcgacgcagcgtccccacttggttgaagntgacatctgacgacgtgaaggagcagatttacaaactggccaagaagggccttactccttcacagatcggtgtaatcctgagagattcacatggtgttgcacaagtacgttttgtgacaggcaataaaattttaagaattcttaagtctaagggacttgctcctgatcttcctgaagatctctaccatttaattaagaaagcagttgctgttcgaaagcatcttgagaggaacagaaaggataaggatgctaaattccgnctgattctaatagagagc

SEQ ID NO: 1571 - DNA, 390 bp, Homo sapiens
gaaggacgtttgtgttggaagccctggtatccccggcactcctggatcccacggcctgccaggcagggacgggagagatggtgtcaaaggagaccctggccctccgggccccatgggtccacctggagaaatgccatgtcctcctggaaatgatgggctgcctggagcccctggtatccctggagagtgtggagagaagggggagcctggcgagaggggccctccagggcttccagctcatctagatgaggagctccaagccacactccacgactttagacatcaaatcctgcagacaaggggagccctcagtctgcagggctccataatgacagtaggagagaaggtcttctccagcaatgggcagtccatcacttttgatgccattca

SEQ ID NO: 1572 - DNA, 383 bp, Homo sapiens
  misc_feature 368: n = A,T,C or G
ctgcagcttctgctgctgaggccgggattgctacgactgggactgaaggtgaaagaggtggaatccgaagtcctgggactgcgggatgctaaacattgaaagctgggtgtaggcactgcagggagagtgtggaggtctgacagggtaggaatatgtgggagggctgggctaggaatggccttggaggctggcctgtgtggatatggcaccaattctaccctgctcctcttttccttttcccagactcagacgatgccctgctgaagatgaccatcagccagcaagagtttggccgcactgggcttcctgacctaagcagtatgactgaggaagagcagattgcttatgccatgcagatgtccctgcangggagcagagtttgg

SEQ ID NO: 1573 - DNA, 149 bp, Homo sapiens
cctccagagcctctctagtggcagagcagctcacactccctccgctgggaacgatggcttctgcctagtacctatccttgtgtttctgatgcagtggtagcattggttcaagttctctcctgctgtggtcagagttgcttcgatgttgg

SEQ ID NO: 1574 - DNA, 143 bp, Homo sapiens
ctgccaggctgaaaagaagcctcagctcccacaccgccctcctcaccgcccttcctcgggagtcacttccactggtggaccacgggcccccagccctgtgtcggccttgtctgtctcagctcaaccacagtctgacaccagag

SEQ ID NO: 1575 - DNA, 112 bp, Homo sapiens
ctgcatccaccctctttcagggggtagagccactatacttctcatgtagatcagccacattgtcactggagactcggatccagccatcctcccgcacgtggtagaggttgac

SEQ ID NO: 1576 - DNA, 198 bp, Homo sapiens
ccagtatgtccccaggattatgtttgttgacccatctctgacagttagagccgatatcactggaagatattcaaatcgtctctatgcttacgaacctgcagatacagctctgttgcttgacaacatgaagaaagctctcaagttgctgaagactgaattgtaaagaaaaaaaatctccaggcccttctgtctgtcagg

SEQ ID NO: 1577 - DNA, 444 bp, Homo sapiens
cctgcctggagccccagatcaccccttcctactacaccacttctgacgctgtcatttccactgagaccgtcttcattgtggagatctccctgacatgcaagaacagggtccagaacatggctctctatgctgacgtcggtggaaaacaattccctgtcactcgaggccaggatgtggggcgtcatcaggtgtcctggagcctggaccacaagagcgcccacgcaggcacctatgaggttagattcttcgacgaggagtcctacagcctcctcaggaaggctcagaggaataacgaggacatttccatcatcccgcctctgtttacagtcagcgtggaccatcggggcacttggaacgggccctgggtgtccactgaggtgctggctgcggcgatcggccttgtgatctactacttggccttcagtgcgaagagccacatccagg

SEQ ID NO: 1578 - DNA, 294 bp, Homo sapiens; identical to SEQ ID NO: 1031

SEQ ID NO: 1579 - DNA, 295 bp, Homo sapiens
  misc_feature 176, 181, 182, 248: n = A,T,C or G
ccacaaagccattgtatgtagctttagctcagcgcaaagaagagcgccaggctcacctcactaaccagtatatgcagagaatggcaagtgtacgagctgtgcccaaccctgtaatcaacccctaccagccagcacctccttcaggttacttcatggcagctatcccacagactcanaaccnngctgcatactatcctcctagccaaattgctcaactaagaccaagtccccgctggactgctcagggngccagacctcatccattccaaaaatatgcccggtgctatccgcccag

SEQ ID NO: 1580 - DNA, 166 bp, Homo sapiens
cttctttattggggacatgtgggctggaacagcagatttcagctacatatatgaacaaatcctttattattattataattatttttttgcgtgaaagtgttacatattctttcacttgtatgtacagagaggtttttctgaatatttattttaagggttaaatcac

SEQ ID NO: 1581 - DNA, 449 bp, Homo sapiens
  misc_feature 420: n = A,T,C or G
ctgaggcaacagaataaatgcagaggcattacaatgaatcccacttaatataaagaactatacagaccaacacttctctacaaaatttttttttcctcattgccagttaaatacagagttttactttcatagcttaacaatgaagggtcatacactgaagccaatacatatacctagcatttcagtctaagcttgtccacgtacatagctgaagtcaattacaaggtttggcctagaaatgctaggggaacttctttgtagtttttacaggtattaaacttcatcttgcacactgaagtcatcatacatacagggcaaaatcagagcttttatatttgcgtttattcttcatttaactttttataacactactatagtttattaaaacaaaaaacaaagagcaagtagtgagcatattangattacagtcctttcactcattcacacct

SEQ ID NO: 1582 - DNA, 302 bp, Homo sapiens
ccaatgggctttgctgtagcttgctgaaatcaccaagcaggagagatttaaccagaggcgatgtgtccagtcaccagcatagagccatcctctgtgtcaccatccacacgcagggccttctggcagacctcatgcaatgccctccatgttaatattcatcagaaaatggataattaggggggccagcaaaaatatcaagggtcaaatatcgcacatttctgtttaggccatctatggctttcatctcctctgaagtcaactggaattcaaacacctgcacgttctgtctgatgcgctgctca

SEQ ID NO: 1583 - DNA, 170 bp, Homo sapiens
ttcctgctccgtgggaaccacgagtgtgccagcatcaaccgcatctatggtttctacgatgagtgcaagagacgctacaacatcaaactgtggaaaaccttcactgactgcttcaactgcctgcccatcgcggccatagtggacgaaaagatcttctgctgccacggagg

SEQ ID NO: 1584 - DNA, 368 bp, Homo sapiens
ccagacgtggtggctcacacctgcagtcccagcaccttaggaggccgaggcaggaggatccttgaggtcaggagttcgagaccagcctcgccaacatggtgaaaccccatttctactaaaaatacaaaaaattagccaagtgtggtggcatatgcctgtaatcccaactactcagaaggccgaggcaggagaattacttgaacgcaggagaatcactgcagcccaggaggcagaggttgcagtgagccgagattgcaccactgcactccagcctgggtgacagagcaagactccatctcagtaaataaataaataaataaaaagcgctgcagtagctgtggcctcaccctgaagtcagcgggcccagg

SEQ ID NO: 1585 - DNA, 392 bp, Homo sapiens
caaccctctctcctcagcgcttcttctttcttggtttgatcctgactgctgtcatggcgtgccctctggagaaggccctggatgtgatggtgtccaccttccacaagtactcgggcaaagagggtgacaagttcaagctcaacaagtcagaactaaaggagctgctgacccgggagctgcccagcttcttggggaaaaggacagatgaagctgctttccagaagctgatgagcaacttggacagcaacagggacaacgaggtggacttctaagagtactgtgtcttcctgtcctgcatcgccatgatgtgtaacgaattctttgaaggcttcccagataagcagcccaggaagaaatgaaaactcctctgatgtggttggggggtctgccag

SEQ ID NO: 1586 - DNA, 158 bp, Homo sapiens
cctccactgccagcctatggttgttcgccaccaagccaggagtgctgcaccgcccagtggtccccctcgggctccaggcccccactgagaccctctcggaggcagaagcacttcacccctcagagtcctacaagtccaaccagtggacctggaattgg

SEQ ID NO: 1587 - DNA, 85 bp, Homo sapiens
ccaatgtacatggtggactatgccggcctgaacgtgcagctcccgggacctcttaattactagacctcagtactgaatcaggacc

SEQ ID NO: 1588 - DNA, 369 bp, Homo sapiens
  misc_feature 363: n = A,T,C or G
ccaggctaccttcccactggagacaggcagggggacaggtgctaagggacctggcaggcagggctggcaggccccatggcgcctgttccagcagatgacaagcccaggtcagggtagagcgggcaggaggggggacgagggctcccacaacatgattttgtgtaaaatatggcagcgacacacgctcagggccgggaggtgggggttagggtggggacggcggcaacatcgtgtaaaaaagtgtcccagttcccatagcaaagagagctgtgaccgggtgttcagagcttctccagtacaagggggaaagccgcccggcgggggcggcgggcagggacatcatttggtttcctggtgctgtcngtccga

SEQ ID NO: 1589 - DNA, 361 bp, Homo sapiens
ctgtagcttctgtgggacttccactgctcaggcgtcaggctcagatagctgctggccgcgtacttgttgttgctttgtttggagggtgtggtggtctccactcccgccttgacggggctgctatctgccttccaggccactgtcacggctcccgggtagaagtcacttatgagacacaccagtgtggccttgttggcttgaagctcctcagaggagggcgggaacagagtgaccgagggggcagccttgggctgacccaggacggtcagcttggtccctccgccgaacagtacaaagggactcaggctgttatcataggactggcagtaataatcagcctcatcttcagcctggagcccag

SEQ ID NO: 1590 - DNA, 434 bp, Homo sapiens
  misc_feature 397: n = A,T,C or G
ctggagaaggtgtgcaggggaaaccctgctgatgtcaccgaggccaggttgtctttctactcgggacactcttcctttgggatgtactgcatggtgttcttggtgctgtatgtgcaggcacgactctgttggaagtgggcacggctgctgcgacccacagtccagttcttcctggtggcctttgccctctacgtgggctacacccgcgtgtctgattacaaacaccactggagcgatgtccttgttggcctcctgcagggggcactggtggctgccctcactgtctgctacatctcagacttcttcaaagcccgacccccacagcactgtctgaaggaggaggagctggaacggaagcccagcctgtcactgacgttgaccctgggcgaggctgacnacaaccactatggatacccgcactcctcctcctgagg

SEQ ID NO: 1591 - DNA, 439 bp, Homo sapiens
  misc_feature 409: n = A,T,C or G
gctttcgccagaaaatgttgcatgtcaaacaatatgtgatccatactgtgtgtcgtccttgggggtttatttgactttgtcacaatgacagccaacagtgagactgataagcctgtaaaaataaaaaaataagactaatcaaatagacatggcattttaatctcaaagtgcaaaatcatctaactgaaaatgacggcattgagaaattccagtggttaaaaatgaatcaaaacttcattacgcaggcagtggaagtgtgttgaaagatttaccaggggtgtcaagttttagacactcagaaaggcaccattctagccatcttgattggataacatgtatatacttatgtccctacgatattcaaaagataatactgttttagtacaaaacaatcaaacaaggcaaagantcaaaaccaagccaacccaaatatccccag

SEQ ID NO: 1592 - DNA, 74 bp, Homo sapiens
  misc_feature 53: n = A,T,C or G
tttttttttctaatgttcacagtccctgctttatttccatttgttcacacacnctttaaaaaaaaaaaaaaaaa

SEQ ID NO: 1593 - DNA, 288 bp, Homo sapiens
ccatccgaagcaagattgcagatggcagtgtgaagagagaagacatattctacacttcaaagctttggtgcaattcccatcgaccagagttggtccgaccagccttggaaaggtcactgaaaaatcttcaattggattatgttgacctctaccttattcattttccagtgtctgtaaagccaggtgaggaagtgatcccaaaagatgaaaatggaaaaatactatttgacacagtggatctctgtgccacgtgggaggccgtggagaagtgtaaagatgcaggattgg

SEQ ID NO: 1594 - DNA, 455 bp, Homo sapiens
ccacacagactcaccaagccacagacttgtcttccacaagcacgttcttaccttagccacgaagtgaccaagccacacgtactaaaggttgaactcaaagatatgtacagggtattaaacaaataccaaggggaacagttaacttcaatacaaggtcaaaatcagcaacaagttctacaatccagtgctgatatcagatacaagcttcaaggacaatttcttttcgaaggcttattccagtttcgtgaggctagcatgaggtgtgtgcatttgccaggggcaaatttctattctcaattaacccatgcagcaaatgctacgcatctgctgagtccgtttagaagcatttgcggtggacgatggaggggcccgactcgtcgtactcctgcttgctaatccacatctgctggaaggtggacagtgaggccaggatggagccaccgatccacaccgag

SEQ ID NO: 1595 - DNA, 367 bp, Homo sapiens
  misc_feature 360: n = A,T,C or G
ccaggctaccttcccactggagacaggcagggggacaggtgctaagggacctggcaggcagggctggcaggccccatggcgcctgttccagcagatgacaagcccaggtcagggtagagcgggcaggaggggggacgagggctcccacaacatgattttgtgtaaaatatggcagcgacacacgctcagggccgggaggtgggggttagggtggggacggcggcaacatcgtgtaaaaaagtgtcccagttcccatagcaaagagagctgtgaccgggtgttcgagcttctccagtacaagggggaaagccgcccggcgggggcggcgggcagggacatcatttggtttcctggtgctgncagtccg

SEQ ID NO: 1596 - DNA, 193 bp, Homo sapiens
ctgttcttcatgcgcctggtggggaagacgcccattgagacactgatcagagacatgctgctgtcggggagtaccttcaactggccctacggctcgggccagtgaccatgacggggccacgtgtgctgtggccaggcctgcagacagacctcaagggacagggaatgctgaggccccgggaggcccctcgagg

SEQ ID NO: 1597 - DNA, 145 bp, Homo sapiens
ccatgctggatgttctgctgcttagacctgatctgctgccaattaccaggggcaggtcaaggatgaccttcttggatccaggaacgctaacatagatcagtaaggaatattcaactcgaaggatgttgcagcccaggatagaagg

SEQ ID NO: 1598 - DNA, 445 bp, Homo sapiens
ctgcctataaaactagacttctgacgctgggctccagcttcattctcacaggtcatcatcctcatccgggagagcagttgtctgagcaacctctaagtcgtgctcatactgtgctgccaaagctgggtccatgacaacttctggtggggcgagagcaggcatggcaacaaatcccaagttagggtctccaatgagcttcctagcaagccagaggaagggcttttcaaagttgtagttacttttggcagaaatgtcgtagtactgaagattcttctttcggtggaagacaatggatttcgccttcactttcctgtccttaatatccactttgttgccacacaacacaatggggatgttttcacacactcgtaccagatctctatgccagttaggcacattcttgtaagtaactctcgatgttacatcaaacattatgatggcacac

SEQ ID NO: 1599 - DNA, 142 bp, Homo sapiens
cctgccccagggggaagcacggacccgagacgacggcgatgaggaagggctcctgacacacagcgaggaagagctggaacacagccaggacacagacgcggatgatggggccttgcagtaagcagcctgacaggagcaatgg

SEQ ID NO: 1600 - DNA, 297 bp, Homo sapiens; identical to SEQ ID NO: 389

SEQ ID NO: 1601 - DNA, 289 bp, Homo sapiens
ctggagatgatcctcaacaagccagggctcaagtacaagcctgtctgcaaccaggtggaatgtcatccttacttcaaccagagaaaactgctggatttctgcaagtcaaaagacattgttctggttgcctatagtgctctgggatcccaccgagaagaaccatgggtggacccgaactccccggtgctcttggaggacccagtcctttgtgcctcggcaaaaaagcacaagcgaaccccagccctgattgccctgcgctaccagctacagcgtggggttgtggtcctgg

SEQ ID NO: 1602 - DNA, 398 bp, Homo sapiens
  misc_feature 274, 312, 329, 332, 368: n = A,T,C or G
gggagggcagagggagaatgggaagatcaggaagctctagattacttcagtgataaagagtctggaaaacaaaagtttaatgattcagaaggggatgacacagaggagacagaggattatagacagttcaggaagtcagtcctcgcagatcagggtaaaagttttgctactgcatctcaccggaatactgagaaggaaggactcaagtacaagtccaaagtttcactgaaaggcaatagagaaagtgatggatttagagaagaaaaaaattatnaacttaaagagactggatatgtagtggaaaggcctagnactacaaaagataagcncanagaagaagacaaaaattctgaaagaataacagtaangaaagaaactcagtcacctgagcaggtaaa

SEQ ID NO: 1603 - DNA, 438 bp, Homo sapiens
ctggtgatctgctttcttaccctaactcttgacaaatgagtcgtctactattttaaagagtctggaggtctctgactctgccataacaataacctgctgttaatttataacacagatttttgtttggaagagccttatttgaaatacactttgattcattttcttaaatatttatattcttttcttgcttacttcagggttggtagcttagttggaagtgccagcacctggcacctattcatatagaacaggctgtactcaagacaacttctagcatttactttaagacttatataatttatttctattttgtgtgtactatagtcttgtgcatatgtagttgaacacacagtgaaatatatgtctctctttgtggatgtgcggcctaaaaatttgaatgtctggtgagagagagccatgtgtataggtcagagaaaa

SEQ ID NO: 1604 - DNA, 297 bp, Homo sapiens; identical to SEQ ID NO: 389

SEQ ID NO: 1605 - DNA, 451 bp, Homo sapiens
ggaaaggctattgtttctcgacagtttgtggaaatgacccgaactcggattgagggcttattagcagcttttccaaagctcatgaacactggaaaacaacatacgtttgttgaaacagagagtgtaagatatgtctaccagcctatggagaaactgtatatggtactgatcactaccaaaaacagcaacattttagaagatttggagaccctaaggctcttctcaagagtgatccctgaatattgccgagccttagaagagaatgaaatatctgagcactgttttgatttgatttttgcttttgatgaaattgtcgcactgggataccgggagaatgttaacttggcacagatcagaaccttcacagaaatggattctcatgaggagaaggtgttcagagccgtcagagagactcaagaacgtgaagctaaggctgagatgcgtcgtaaag

SEQ ID NO: 1606 - DNA, 272 bp, Homo sapiens; identical to SEQ ID NO: 1006

SEQ ID NO: 1607 - DNA, 444 bp, Homo sapiens
ccaggctggtctcaaactcctcacctcaactgatccgcccaccttggcctcccaaagtgctgggattataggtgtgagccaccgtgcccaaagttaagtatttttgatcaagtgttttgtcttttgtgcaaggcatttgtggctctgtcatagcagaggaaaacaaaacatgcctatcaaatgaatcaagtccgacctcttctcatattgagcaactagaggtctaggaacatttcccctacctgtcattctcatctggcataccaggtgtacatactccttcttattctcctctgttaccaagatgttggccccattgggtttgaggtcacgaacttcacaaactccaaactcttggacctcagtgctgaaggtgaggtcatagcctagtgtggagacatcattttccagcagataaaccagaccttggtagaagtggtaatc

SEQ ID NO: 1608 - DNA, 189 bp, Homo sapiens
caaaatccaaaacttctcttgaaaagttcagggaccgtccaggggagatggggaggagatatggagtgagtcacctgctccagaagatgccagcttctctctccagggtgcttagttggctttgcccacccctcactccccagggagctctggggacagcttcctcgcacccctgtcccacccacacag

SEQ ID NO: 1609 - DNA, 426 bp, Homo sapiens
cttttgttatccttagaggactcactggtttcttttcataagcaaaaagtacctcttcttaaagtgcactttgcagacgtttcactccttttccaataagcttgagttaggagcttttaccttgtagcagagcagtattaacacctagttggttcacctggaaaacagagaggctgaccgtggggctcaccatgcggatgcgggtcacacggaatgctggagagatgttatgtaatatgctgaggtggcgacctcagtggagaaatgtaaagactgaattgaattttaagctaatgtgaaatcagagaatgttgtaataagtaaatgccttaagagtatttaaaatatgcttccacatttcaaaatataaaatgtaacatgacaagagattttgcgtttgacattgtgtctgggaaggaagggcca

SEQ ID NO: 1610 - DNA, 447 bp, Homo sapiens
cagggctatagtgcgctatgttgatctggtgttcatgctaagttccgcatcaatatggtgacttcttgggagtgggggaccaccaggttgcctaaggaggggtgaacctgcctacgttggaaatagagctggtcaaaactcctgtgctcatcagtagtagaattgcacctgtgaatagccaccgccctccagcatgggcaacatagcaagaccctgcctcttaagataaaaattggaaaacactggtaggaaaaaaaggctgtttggtctaaataagtctggattgggtataaatgacacaaaactatcatgaatttgaaagcatttctaatttcttgaaagtctgaaaaagtttaaacagaattttagctgaaaagtcctgaaagacatttgaaaaaaaacagcaagaacacttaaaactattcaaggtttgggctgggcacagtg

SEQ ID NO: 1611 - DNA, 238 bp, Homo sapiens
ccaccggggttgacctctctcgctagcagggcccacccagctcactccccgcgtcttccatcccctctaggattcccattgtcccctactccagcactaggcaggcacccccagcccactgcgactcccaccacgaaggaccccagccctctctcagccaacacggccccgcccaccgtctcagacatcgtgcttcttctggtgggccaggagtctctcctcgtcgtcgaaggtctgg

SEQ ID NO: 1612 - DNA, 293 bp, Homo sapiens
ctgctgcttgtatcctcgggagagggtttcccactctgagcgggtgggaaggcaatgccaaacatccgggaaaaataaaaccactgtctccacatgagctggaactgtacgccccttgtgggtctcctcagggcgatggtagcgaatctctgcaaaacggtaccattgtgtgcacacacttagatcaatgcctgtcagagccttacaacaacgaatagcagtcttaatcaacacagagggatctttttctgggtctggtccatccaacgaaggagaccagtggcccccaatgg

SEQ ID NO: 1613 - DNA, 224 bp, Homo sapiens
ctggattgaccccaaccaaggctgcaacctggatgccatcaaagtcttctgcaacatggagactggtgagacctgcgtgtaccccactcagcccagtgtggcccagaagaactggtacatcagcaagaaccccaaggacaagaggcatgtctggttcggcgagagcatgaccgatggattccagttcgagtatggcggccagggctccgactctgccgatgtgg

SEQ ID NO: 1614 - DNA, 439 bp, Homo sapiens
ctccaccctggcgatggctccctggtcctactttctctctcaaactggctttttctcattcctttgactccgccagacttcctcgcccccatgacctggtgttgtgtctgatcaccccaacattcctggctgcccaatgtggggcaatgaagaccccagtgaaggaatgctagagtgtgtgaaagtggaggacgcatcgtcaaaggacacctgaggacgtctcaaagaagctcggcgggagagctgagcgctcggaagaaccaagaatcatctcttttgaaaaatcgattcatcaaatgaatcttcggccaacaactgttcaagaaggattcaaatatcacaggttccaagaagtaaagctttggaggtcacaaaattagcaatagaagctgggttccgccatatagattctgctcatttatacaaataatgaggagca

SEQ ID NO: 1615 - DNA, 237 bp, Homo sapiens
aggcactcctggaagtggttcagtcaggtggcaaaaacattgaacttgctgtcatgaggcgagatcaatccctcaagattttaaatcctgaagaaattgagaagtatgttgctgaaattgaaaaagaaaaagaagaaaacgaaaagaagaaacaaaagaaagcatcatgatgaataaaatgtctttgcttgtaatttttaaattcatatcaatcatggatgagtctcgatgtgtagg

SEQ ID NO: 1616 - DNA, 266 bp, Homo sapiens
ctgggctctagtttcattccatctgtcattctcaggtaacagggacacatgtccaagtgttggcccccgtggcatgattgtagctttgttgataggcattgcatcttttgtgtaatatgcaataatggcatgaccagattcatgatatgctgtgatggttttgtttttgttatcaatttccacacttcttctttcaggccccattagaattttgtctttggaaaactccagctccttcatggtaaccatttcttttccatcaacag

SEQ ID NO: 1617 - DNA, 185 bp, Homo sapiens
  misc_feature 62: n = A,T,C or G
ccatggctaggtttatagatagttgggtggttggtgtaaatgagtgaggcaggagtccgagnaggttagttgtggcaataaaaatgattaaggatactagtataagagatcaggttcgtcctttagtgttgtgtatggttatcatttgttttgaggttagtttgattagtcattgttgggtggtg

SEQ ID NO: 1618 - DNA, 354 bp, Homo sapiens
  misc_feature 201, 214, 225, 230, 232, 241, 245, 249, 278: n = A,T,C or G
ctgttaacagataagtttaacttgcatctgcagtattgcatgttagggataagtgcttatttttaagagctgtggagttcttaaatatcaaccatggcactttctcctgaccccttccctaggggatttcaggattgagaaatttttccatcgagcctttttaaaattgtaggacttgttcctgtgggcttcagtgatggngatagtacacatntcactcagagngcatntntgcatcttntaanatanatttcttaaaagcctctaaagtgatcagntgccttgatgccaactaaggaaatttgtttagcattgaatctctgaaggctctatgaaaggaatagcatgatgtgc

SEQ ID NO: 1619 - DNA, 170 bp, Homo sapiens
  misc_feature 145, 146: n = A,T,C or G
ctgtgctgtggagagaagctgatgttttggtgtattgtcagccatcgtcctgggactcggagactatggcctcgcctccccaccctcctcttggaattacaagccctggggtttgaagctgactttatagctgcaagtgtatctnncttttatctggtgcctcctcaaac

SEQ ID NO: 1620 - DNA, 386 bp, Homo sapiens
cctgttgattgcatactgtagaagatttgatgttcagactggttcttcttacatatactatgtttcgtctacagttggtaaatttttgtttttctttgtattaaatgttgaattgtattgtctggaggaaaagacagaggtctaaaaataaagaaggagtacagtttgggcatggtggttcacccctggagtcctagcactttgggggccaaggcaggcagattgcttgagcccaggagttctagatgagcctgggcaacatagtgagaccccatctctaaaaaaacagttttagggccaggcacagtggctcacacctgtaagcccagcactttgggaggccgaggcaggcagatcataagggcaagagattgagaccatcctgg

SEQ ID NO: 1621 - DNA, 346 bp, Homo sapiens
  misc_feature 267: n = A,T,C or G
ccaattctgcccgttccccgtgggccaacaacactggggttgtatgcgtctggaaccctgtgatagtcttcggcttgccagcctggcccaccacatccactgcctggcccacacggacagacactggcaatggccgcagctcctcatcaaacgtaaccagcattcggggctgcatggcagccaccagcccatacaatacatagtgtgatttgcctagaataatgtttcgaacatccaggaaagagacaagcacagtgagcagtccanccacggccacctggctcataagctgccggtcgctgtggtaggggcagagggtaagggtgcccttccctaaatgtgtcag

SEQ ID NO: 1622 - DNA, 366 bp, Homo sapiens
ggaagtttgtgctctctgcgtggctaagtttttcacctactaggacgggggtggggtggggagaacaggtgtccttctaaaatacagcacaagctacagcctgcgtccagccataacccaggagtaacatcagaaacaggtgagaatgaccactttaactcaccgggcccgtcgcactgaaataagcaagaactctgaaaagaagatggaaagtgaggaagacagtaattgggagaaaagtccagacaatgaagattctggagactctaaggatatccgccttactcttatggaagaagtattgcttctgggactaaaagataaagaggggtacacatctttctggaatgactgcatatcatcagg

SEQ ID NO: 1623 - DNA, 165 bp, Homo sapiens
ctgttgattggctgtgacactgctttgtgtcatcttcttaccatgatcaaaggcgaaggaagggatctcttttgggacattgtgattgttttagcagagagagaaagagatgaaatacacttcggttttctcttaaaagatgcatgtatcatacagtgctttaag

SEQ ID NO: 1624 - DNA, 227 bp, Homo sapiens
ccaatgcccggagcaggccctctttccatcccctgtcggatgagctggtcaactatgtcaacaaacggaataccacgtggcaagccgggcacaacttctacaacgtggacatgagctacttgaagaggctatgtggtaccttcctgggtgggcccaagccaccccagagagttatgtttaccgaggacctgaagctgcctgcaagcttcgatgcacgggaacaatgg

SEQ ID NO: 1625 - DNA, 373 bp, Homo sapiens
ctgtagcttttgtgggacttccactgctcaggcgtcaggctcaggtagctgctggccgcgtacttgttgttgctttgtttggagggtgtggtggtctccactcccgccttgacggggctgctatctgccttccaggccactgtcacggctcccgggtagaagtcacttatgagacacaccagtgtggccttgttggcttgaagctcctcagaggagggtgggaacagagtgaccgagggggcagccttgggctgacctaggacggtcagtttggtccctccgccgaacacccgaagataattagtgctgtctgttgagtaacaatagtagtcaccttcatcttccacctgggccccagtgatggtcaaggtgg

SEQ ID NO: 1626 - DNA, 367 bp, Homo sapiens
ccagacgtggtggctcacacctgcaatcccagcaccttaggaggccgaggcaggaggatccttgaggtcaggagttcgagaccagcctcgccaacatggtgaaaccccatttctactaaaaatacaaaaattagccaagtgtggtggcatatgcctgtaatcccaactactcagaaggccgaggcaggagaattacttgaacgcaggagaatcactgcagccctggaggcagaggttgcagtgagccgagattgcaccactgtactccagcctgggtgacagagcaagactccatctcagtaaataaataaataaataaaaagcgctgcagtagctgtggcctcaccctgaagtcagcgggcccagg

SEQ ID NO: 1627 - DNA, 424 bp, Homo sapiens
ctggataaggacatcaataccttctctatgcgtgtcagggtgtggtacgggtatcactttccggagctggtgaagatcatcaacgacaatgccacatactgccgtcttgcccagtttattggaaaccgaagggaactgaatgaggacaagctggagaagctggaggagctgacaatggatggggccaaggctaaggctattctggatgcctcacggtcctccatgggcatggacatatctgccattgacttgataaacatcgagagcttctccagtcgtgtggtgtctttatctgaataccgccagagcctacacacttacctgcgctccaagatgagccaagtagcccccagcctgtcagccctaattggggaagcggtaggtgcacgtctcatcgcacatgctggcagcctcaccaacctgg

SEQ ID NO: 1628 - DNA, 314 bp, Homo sapiens
tcgactgttatagcttagaaagcaacactactactatgagactataaaacattaaactattttaagaaaaccacgctgtggaaaaatggagccatttttgtcaaaaagtggctcaaagcacaaaactgctcagatgttcaagagtcctaggagtctgggctgcacagtattaaggggtgagaggagaccgacagcctgtttgaatcaggcttgtgagcccagctcatctgacaacttcaaagagcttctctgcctatacattccaccgtttagcataagacaccactttacgctatttacaagtctccttttgg

SEQ ID NO: 1629 - DNA, 393 bp, Homo sapiens
  misc_feature 284: n = A,T,C or G
ctggaccagcaccccattgacgggtacctctcccacaccgagctggctccactgcgtgctcccctcatccccatggagcattgcaccacccgctttttcgagacctgtgacctggacaatgacaagtacatcgccctggatgagtgggccggctgcttcggcatcaagcagaaggatatcgacaaggatcttgtgatctaaatccactccttccacagtaccggattctctctttaaccctccccttcgtgttttcccccaatgtttaaaatgtttggatggtntgttgttctgcctggagacaaaggtgctaacatagatttaagttgaataacattaacggtgctaaaaaatgaaaaattctaacccaagacatgacattcttagctgtaa

SEQ ID NO: 1630 - DNA, 317 bp, Homo sapiens
ctgcaagaatatcagaaatcaatacaaacaagtattgacaggtgttacagacatgcaaaatatccttcaatgcaacgaatttttaagaaatcagctagcctatattaatcagatgttttaggtcaaaccaagtttccatctcgggctcagtgaaatagtattaactcattgagtctcctttcccccaggaatgttgggaatggcagaacagaaagagctatcactccttaaattcttttatgcgagtgttactccaacacttattttacttggtttacttggaatgtatgagaggaaactgatgttttttacaatgg

SEQ ID NO: 1631 - DNA, 262 bp, Homo sapiens
ccttaggcaagtcaccttacttatctaagactgtttccccacctggaagatgccctacaagcctcctgtggctgtgtttagaaagcatgcccggcctttcttgacagccagccaccccagatgatggcagggcaaggaagactgttaggagtcagagtgctcccctcaggtggaaggaaactgggccaactctactttgtaagccatagggtgccaggtagcccggccaccctgagcctgtgcctccactgcccccgcgtgg

SEQ ID NO: 1632 - DNA, 138 bp, Homo sapiens
ctggaattaattcttcgacaactccagaccgaccttcggaaggaaaaacaagacaaggccgttctccaagcagaagtgcagcacctgagacaggacaacatgagactgcaggaggagtcccagaccgcgacagctcag

SEQ ID NO: 1633 - DNA, 192 bp, Homo sapiens
  misc_feature 17, 55, 80, 81, 94, 95, 106, 107: n = A,T,C or G
ccttgaagggacctcanagcaaaggaagagacctgggtgtggtgaggcatcccanggcatggaagggaccggttgtgctnngggaatccactgnnccctccttggnnaaaaaagcacaacacatcatacatatttaccagaccagaagcgctggccccaagtctccccaacctggtcgggggaacctcctgg

SEQ ID NO: 1634 - DNA, 447 bp, Homo sapiens
ctgcttttaaaggtcttaaatcactcgaataccttgacttgagcttcaatcagatagccagactgccttctggtctccctgtctctcttctaactctctacttagacaacaataagatcagcaacatccctgatgagtatttcaagcgttttaatgcattgcagtatctgcgtttatctcacaacgaactggctgatagtggaatacctggaaattctttcaatgtgtcatccctggttgagctggatctgtcctataacaagcttaaaaacataccaactgtcaatgaaaaccttgaaaactattacctggaggtcaatcaacttgagaagtttgacataaagagcttctgcaagatcctggggccattatcctactccaagatcaagcatttgcgtttggatggcaatcgcatctcagaaaccagtcttccaccggatatgtatg

SEQ ID NO: 1635 - DNA, 364 bp, Homo sapiens
gttttatttgagacataaaaacacatgtgtttctattacatagtgtggggtttagggtcctggtttctaagacaagactttatttcaccctgtatcacagcttcctgggaaatgaattagggagcaagagacggcctggcaagaaaatcattattgttgctgggaagttgcaaagaaaggggagagtttattcaaattagtgtaacagagcccccaggatgaagagagtggtgcagggaaaaggtctaaattcctggtgttggtggggacactggcacatcccacagcaaggactcagccctcaacggcggcggctgggtcttgggaggggagtggtgggagggtaagggctcctcagctccct

SEQ ID NO: 1636 - DNA, 399 bp, Homo sapiens
ctggctggctagactgtttgtgcgccaagaggatggtcagcgctgctttccagcctggctctgctggggcgctggcatctggttcagttccaccattctccctgctttctttgccaagtgtgatattcacccaagggcaccagtctctatgctgagaggtgggatcaaagaagcttcgggaagatgtgtccgaactgctggaggagcagaggcgagctcgcttggctttccgcagagggctagatggtacctccaggccaggggtgtctcctgttcccatgcttcgggtcactgggcgagttctggtggtggggctagcagcctctggctcaggacggtcaacaggactggaagagtcccagctccgagttcgagagacaatgggaccagggctctttt

SEQ ID NO: 1637 - DNA, 246 bp, Homo sapiens
ctgagctttcagcagataaatcacagcagaaatagaatcaccctaggactttcaatcaaaagctggaagtccaccttacagaaagacaaaaagaaacccctttttatatcttaacaaagcaatagctctcaagcagcagagcatctcgaggaagaaagcttgcccggtcgccatcccatcatgccagagcgtgcagtgtccacccttgactacgctggggaattgctgattttttgaaaaagcttg

SEQ ID NO: 1638 - DNA, 453 bp, Homo sapiens
ccaagagttctccactgtgaagactgaaaggacctggtgacatttcggcatcagtcctgttaccacttggaggtaacagaagcaggctcgtgtcctcctttaattctaccacactacatgactcgcaattggttctgaaattagaacgttcaccatcgtacttaaaatcttaggggcatgaagagtcagctagaacaaggaaaaagaaagtcgcaggtagtaggtaagtaggtgggcacatgaaaagccaagctgctctgtccaacaccagtgtacatgtgctttaactaaatgaactccagaggccaacagcagcagacctgctcaattcaccttccaaatcagaacaagaccaaaaagctcaggcttgagttgtcaactatgcataggttccgccagtgatgaggagctcgtaagcaggatctctactccttctgcacaacacgatgcaag

SEQ ID NO: 1639 - DNA, 197 bp, Homo sapiens
tttgctgttcgtgatatgagacagacagttgcggtgggtgtcatcaaagcagtggacaagaaggctgctggagctggcaaggtcaccaagtctgcccagaaagctcagaaggctaaatgaatattatccctaatacctgccaccccactcttaatcagtggtggaagaacggtctcagaactgtttgtttcaattgg

SEQ ID NO: 1640 - DNA, 278 bp, Homo sapiens
ccagagcggtgagtcccaccacctcgaactctgggaattcgagccacagctctgccagtaccccaagactcagcactagtctgatgacctgctaattcactgacagcatagggctgtctgttgtttttgcgcaagttggtgtgaacaaagttcacaatatctggtcgaataggagccttgaatacagcaggcaaagtgacatttttgccagatgactcccccttttcggagtacaccgatatcagtgggcgagcgcacgccatggcggacctcggccg

SEQ ID NO: 1641 - DNA, 227 bp, Homo sapiens
ccattgttcccgtgcatcgaagcttgcaggcagcttcaggtcctcggtaaacataactctctggggtggcttgggcccacccaggaaggtaccacatagcctcttcaagtagctcatgtccacgttgtagaagttgtgcccggcttgccacgtggtattccgtttgttgacatagttgaccagctcatccgacaggggatggaaagagggcctgctccgggcattgg

SEQ ID NO: 1642 - DNA, 299 bp, Homo sapiens
ctgcacatcaaggacatcttcaggaagttcaggattgccgtagctaaactgaaaaccaccatccatggactctccaaaccaaacgtgtttcttctcagcactagaatctgtccaccagtgtttccgtggaacattcaaaggattggcacttatgcatgtttccccagtttccatattacagaataccttgatagcatccaatttgcatccttggttagggtcaacccagtattctccactcttgagttcaggatggcagaatttcaggtctctgcagtttctagcggggtttttacgag

SEQ ID NO: 1643 - DNA, 301 bp, Homo sapiens
ccaagggctacaatgagcagcgcatcagacagaacgtgcaggtttttgagttccagttgactgcagaggacatgaaagccatagatggcctagacagaaatctccactattttaacagtgatagttttgctagccaccctaattatccatattcagatgaatattaacatggagagctttgcctgatgtctaccagaagccctgtgtgtggatggtgacgcagaggacgtctctatgccggtgactggacatatcacctctacttaaatccgtcctgtttagcgacttcagtcaactacag

SEQ ID NO: 1644 - DNA, 365 bp, Homo sapiens
ctggtgagcgaaggatgggagcagagaacagagctaaaacccctggttttcctttccccagatgtaaagcctgctagctggaactcacagaagattggaacaaaaagataggagatggacacctgggggactgctccagcacgaagggaagcgatgagcatcacacagcagggccattgcaggggacaggtgctgtaattcctgcccagagaacttgaaagcttacagtgtgctcacaggaaggaatcggctcagctagtccagaaattgctgcatttcccatattacttagttctttattcatcctgtggtaaagagtcacccttgttttccgtatctataaaactgaaagacttaaaatttac

SEQ ID NO: 1645 - DNA, 249 bp, Homo sapiens
ctggtgctggaactgcagaaagttaagcaggagaacatccagctagcggcagacgcccggtctgctcgtgcctatcgagacgagctggattccctgcgggagaaggcgaaccgcgtggagaggctggagctggagctgacccgctgcaaggagaagctgcacgacgtggacttctacaaggcccgcatggaggagctgagagaagataatatcattttaattgaaaccaaggccatgctggaggaacag

SEQ ID NO: 1646 - DNA, 433 bp, Homo sapiens
  misc_feature 398: n = A,T,C or G
ctgtggccggattgatggggcccccacttcctagggctgaaggcaagttgaaggaagcagcaggagtaccggaatgaaaaccttgtttctcaaaggactgctgggttttggagtacacagaacccgagatatctggcacgcccgtgttactggaggtgactgaaacaccagtgttgtatccatgagacccatatccactcggctgttggaaaggggtggccgatgcattcacactgacattcacaccatgctgcttggaagaggtaggagccacagggaacacagcaggcccatactggaaggtgctggggaggcccgggacccctgtatagtatggcaggctggtgtaaactgtagccaggaggcagcgccgggttcaggaatgtctgctgcgtggnatggtgagtctgcgtctggtttctgttggggttgg

SEQ ID NO: 1647 - DNA, 451 bp, Homo sapiens
ccagcttgcaagcacgctggcaaatctctgtcaggtcagctccagagaagccattagtcattttagccaggaactccaagtccacatccttggcaactggggacttgcgcaggttagccttgaggatggcaacacgggacttctcatcaggaagtgggatgtagatgagctgatcaagacggccaggtctgaggatggcaggatcaatgatgtcaggccggttggtagcgccaatgatgaacacatttttttttgtggacatgccatccatttctgtcaggatctggttgatgactcggtcagcagccccaccaccatctccaatgttacctccacgagccttggcaatcgaatccagctcatcaaagaatagcacacagggggcagcttggcgggccttgtcaaagatttctctgacattggcctcagactccccaaaccacatggtgag

SEQ ID NO: 1648 - DNA, 176 bp, Homo sapiens
cctaaacgaggatttcagcttccattatgcccaactccagtccaacatcattgaggcgattaatgagctgctagtggagctggaagggacaatggagaacattgcagcccaggctctggagcacattcactccaatgaggtgatcatgaccattggcttctcccgaacagtagagg

SEQ ID NO: 1649 - DNA, 435 bp, Homo sapiens
tgtggctgtgccgttggtcctgtgcggtcacttagccaagatgcctgaggaaacccagacccaagaccaaccgatggaggaggaggaggttgagacgttcgcctttcaggcagaaattgcccagttgatgtcattgatcatcaatactttctactcgaacaaagagatctttctgagagagctcatttcaaattcatcagatgcattggacaaaatccggtatgaaagcttgacagaccccagtaaattagactctgggaaagagctgcatattaaccttataccgaacaaacaagatcgaactctcactattgtggatactggaattggaatgaccaaggctgacttgatcaataaccttggtactatcgccaagtctgggaccaaagcgttcatggaagctttgcaggctggtgcagatatctctatgattgg

SEQ ID NO: 1650 - DNA, 246 bp, Homo sapiens
ccatgtctgtattgtaactggtaaaaggcttcaagtcagattgatgatcaagaaaagtcaaaaccccagcccaagattgggaaagcaggtggtggttccaagcttttaaaaaattattgaagctctccatcctgttctgtgagtgtgtcttctctttctccttcacgtcatagccgtgacccaccgttcatctctgctcttgcgtaaagatgaccgatggagtccaaagccaagtggcttcaccag

SEQ ID NO: 1651 - DNA, 400 bp, Homo sapiens
  misc_feature 171, 172, 303, 344, 354, 357, 366, 367, 379, 391: n = A,T,C or G
cggcaagttctcccaggagaaagccatgttcagttcgagcgccaagaccgtgaagcccaatggcgagaagccggacgagttcgagtccggcatctcccaggctcttctggagctggagatgaactcggacctcaaggctcagctcagggagctgaatattacggcagctanngaaattgaagttggtggtggtcggaaagctatcataatctttgttcccgttcctcaactgaaatctttccagaaaatccaagtccggctagtacgcgaattggagaaaaagttcagtgggaagcatgtcgnctttatcggctcagaggaggaattctgcctaagccaactcnaaaaagccgnacnaaaaattanngcaaaaagcgtnccaggagccgtnctctgacag

SEQ ID NO: 1652 - DNA, 338 bp, Homo sapiens
ctgggggtgcccatcttctgtgctctgtggtacatatctgtgtcgccaaagtagcgtgcccggtacagcaagccttccttctgctgcttctccttccagcagttgttccggaggttggcgatataatcatcttccacattccgctcgactgttttgaggctggagcctgtgtactcttcggagaaagtgtctcccacatagtagacgacacccaggtggtcagtgactcgcctgtggatgtggcccacagacggtcttggactcagactgtagggtggactggagaccatgagctggctgagagctgacacgagaatcaggatgaggataggcatcag

SEQ ID NO: 1653 - DNA, 167 bp, Homo sapiens
gcggtggagccgccaccaaaatgcagattttcgtggaaacccttacggggaagaccatcaccctcgaggttgaaccctcggatacgatagaaaatgtaaaggccaagatccaggataaggaaggaattcctcctgatcggcagagactgatctttgctggcaagcag

SEQ ID NO: 1654 - DNA, 1034 bp, Homo sapiens
  misc_feature 88, 827, 882, 897, 905, 933, 945, 950, 955, 973, 976, 991,999, 1010, 1022, 1023, 1024, 1033: n = A,T,C or G
atgcatgctcgagcggccgccagtgtgatggatatctgcagaattcgcccttagcgtggtcgcggccgaggtccaagagggagataanacaaacttctcaaacaaaaagaaaagaaaaacgaatgattcatctgctttaatcagtgtgattaatgcagcacccattgccccgggaaccgtttctgctgtactatctggatactaaaatgttacggaagtagctctttgttctccctcactctgcccttagttaatagaaattcagactcgccaagtaaggctttgtgcatagtgtcttcatgtcgcgtatagttgagcgcgttcttagcagttggcttcatggacagctcattagtgttttgacttttcttacccagcgttaattgaattcttgcttttagacaacttcctttttgtagtggtgaaccttgccctttagtacagttcaagtgaatctggataattgttcatctttgctttagcttagataccatgtagtggtctgtggctacaggaagctggttctgtctgcttccacagtctgcttaaaaaactgtctgacttcgtgaatatagagaccaagtttaccacttctgatgaagagaccaattaagattcattcctcattctgtttctttccagtgggagaagagtccccatgaaataagatgaaactgattccatgcactagtacatgtaggcttctcccttgcgcaaagcttaacaatttgtaggaaactttgggtctttttgtcccaagaaaaaggaatgtcttgacaggcttaaagcttttcgtccccttgcaccttaaaactcgaaagttaggnaaaatccctttaaagggctttttttaatagccagaacttcccaaaaggaatggcnttttagggaatttcntagccatngctttttaaatttaaagaaatttttaanaaccttgccccnggggnggggncccgctccaaaaaggggnggnaaaattccccagccnaccctttnggggggggccncgttttcctttnnnggggggaanc

SEQ ID NO: 1655 - DNA, 487 bp, Homo sapiens
atgcatgctcgagcggccgccagtgtgatggatatctgcagaattcgccctttcgagcggccgcccgggcaggtcctactcttctccgtccattgtactatctgcccgtggtggggatggcagtaggatcatatttgatgacttccgagaagcatattattggctccgtcataatactccagaggatgcgaaggtcatgtcctggtgggattatggctatcagattacagctatggcaaaccgaacaattttagtggacaataacacatggaataatacccatatttctcgagtagggcaggcaatggcgtccacagaggaaaaagcctatgagatcatgagggagctcgatgtcagctatgtgctggtcatttttggaggacctcggccgcgaccacgctaagggcgaattccagcacactggcggccgttactagtggatccgagctcggtaccaagcttggcgtaatcatggtcatagctgttt

SEQ ID NO: 1656 - DNA, 514 bp, Homo sapiens
  misc_feature 55: n = A,T,C or G
atgcatgctcgagcggcccgccagtgtgatggatatctgcagaattcgcccttancgtggtcgcggccgaggtcctacccataatccagagaggcttgcccagaggaggactacgtgggggacgtgccaccagaaccctacttgggggcgggatgtcactccgaggtcaaaacctgctccgaggtggacgagccgtagctccccgaatgggcttaagaagaggtggtgttcgaggtcgtggaggtcctgggagagggggcctagggcgtggagctatgggtcgtggcggaatcggtggtagaggtcggggtatgataggtcggggaagagggggctttggaggccgaggccgaggccgtggacgagggagaggtgcccttgctcgccctgtattgaccaaggagcagacctgcccgggcggccgctcgaagggcgaattccagcacactggcggccgttactagtggatccgagctcggtaccaagcttggcgtaatcatggtcatagctgttt

SEQ ID NO: 1657 - DNA, 605 bp, Homo sapiens
  misc_feature 78, 91: n = A,T,C or G
atgcatgctcgagcggccgccagtgtgatggatatctgcagaattcgccctttcgagcggccgcccgggcaggtccanacgctgacattgnttctgagtccttaagcaggaaggatttgaaatcctggagcttggcagtcttgctcttcacctctaagccaatgttgaccccttcatctataaagtccacaactctccggaagtcatcctcacggaactgtcgagaagttaaggctggggccccaagccgcaggccgcccggtgtgatggcacttcggtctccaggacaggtgttcttgttggcagtgatggatacaagctctagcacccgctcagcccgagctccatccaggcccttgggccgcaggtccaccagcaccaggtggttgtcagtaccacctgataccagtgagtagcctcgccctagcagggcatctgccatggcccgagcattcttcagaacctgcagggagtactcccggaacatgggggtgcaggacctcggccgcgaccacgctaagggcgaattccagcacactggcggccgttactagtggatccgagctcggtaccaagcttggcgtaatcatggtcatagctgtttc

SEQ ID NO: 1658 - DNA, 784 bp, Homo sapiens
  misc_feature 3, 4, 10, 19, 22, 53, 76, 85, 87, 149, 184, 713, 747: n = A,T,C or G
agnnttccgncggccctcnagntgcatgctcgagcggccgcgcagtgagatgnatatctgcagaattcgcccttancgtgggcgnangcatgacgctcgggatcagaactaaaacaagtgagatcacccctctaattatttctgaactnggttaataaaagcttataagatttttatgaagcanccactgtatgatattttaagcaaatatgttatttaaaatattgatccttcccttggaccaccttcatgttagttgggtattataaataagagatacaaccatgaatatattatgtttatacaaaatcaatctgaacacaattcataaagatttctcttttataccttcctcactggccccctccacctgcccatagtcaccaaattctgttttaaatcaatgacctaagatcaacaatgaagtattttataaatgtatttatgctgctagactgtgggtcaaatgtttccattttcaaattatttagaattcttatgagtttaaaatttgtaaatttctaaatccaatcatgtaaaatgaaactgttgctccattggagtagtctcccacctaaatatcaagatggctatatgctaaaaagagaaaatatggtcaagtctaaaatggctaattgtcctatgatgctattatcatagactaaccgacatttatcttcaaaacaccaaattgtctttagaaaaaattaatngtgattaccaggtagaaggacctgcccgggcggnccgctcgaaagggccgaaattccagccccacctgggc

SEQ ID NO: 1659 - DNA, 789 bp, Homo sapiens
  misc_feature 2, 4, 19: n = A,T,C or G
tngngccctctagatgcangctcgagcggccgccagtgtgatggatatctgcagaattcgcccttagcgtggtcgcggccgaggtccattaaagataagtttggctaactattttactgaagagactaatggtcttccctctgttgtactgctatgtttcttgatctgtttttccccaatgtaacagtctacattgaagtcctttagctctctccatatactaattgacatttgttaaggattcaatattttgtgaattctttttacccttaaaatgcatatctttcagagagataagaatgaattttgcaataatttatatgcagagtgtgcttatgggtttctgggagttcaagttagtaccccagagtgcttaaaagtacgatgctaaattctaaggctaatgtaatgactgtagattatctatgtccacattgttcaacagaaatataatgtgaaccacaacataatttttaattttctagtagccatattaaaaaagaaacaagcaaaattaattttaataacagtttatgtaacccagtatattaaaaatatcatttcaacatgtaatcaatataaaagattattaatgaaacaccttatcctctttttcttccatgctaagtcttagatttgagtgtattttgcactcacagcacatctcaattctgactggacctgcccgggcggccgctcgaaagggcgaattccagcacactgggcggccgttactagtggatccgagctccggtaccaagcttggcgtaatcatggtcatagctgttt

SEQ ID NO: 1660 - DNA, 559 bp, Homo sapiens
  misc_feature 3, 53, 313, 323, 330, 368, 411, 452, 457, 460, 463, 470,487, 499, 516, 518, 545: n = A,T,C or G
ccncgccctctagatgcatgctcgagcggccgccagtgtgatggatatctgcngaattcgccctttccagcggccgcccgggcaggtccatcagacttcttgggtgcctggctatattcaatgtgaagtaaaaaatatcccaagtcttacaccaaaatagaggctctgacttagaagtatgcttttagctttctttttaaataagacattctggaagaaaaaaaaagaaaaaggaaagaaaatcaagtttgaaacacagttaacacttattttggcaagaaagcaaccaaaatctaaaaagcataaactatgngtccaaatgnaaaaggnattacagaacaaactgcaagaggggaaaattaaagccncactgaacgaaaaaatacagtatgtctaacattttggaattgnaatttaaaccctaagggcaaaagctgaaaaatcatgcttanacctnggncgngaccacnctaagggcgaattccancacactggcggncgttactagtggatccnanctcggtaccaagcttggcgtaatcctnggcatagctgtttc

SEQ ID NO: 1661 - DNA, 453 bp, Homo sapiens
ttgggccctctagatgcatgctcgagcggccgccagtgtgatggatatctgcagaattcgccctttcgagcggccgcccgggcaggtctgcagtgtccctttttatatcatgctagtgttgagacatacttgactaacttgggaacagttcgatatattgacaaccgtcaacttaagaaaatcaacagcttttggccccagcgtccaagtgaacttttcatggagtgcagaatctcaaatggacaaaatactttgtctttttaaatactgaaaatttaattattagtactatgactgaaagattcttcatggctaaaaagctctgcatcaaactcaattcaggaggacctcggccgcgaccacgctaagggcgaattccagcacactggcggccgttactagtggatccgagctcggtaccaagcttggcgtaatcatggtcatagctgtttc

SEQ ID NO: 1662 - DNA, 809 bp, Homo sapiens
  misc_feature 16, 25, 47, 98, 301, 437, 446, 461, 464, 491, 500, 524, 526,530, 564, 589, 599, 603, 617, 633, 657, 658, 676, 682, 689,696, 709, 726, 738, 742, 751, 753, 755, 762, 773, 776, 779,784, 789, 792, 802, 805: n = A,T,C or G
ctcgagcggccgccantgtgatggntatctgcagaattcgcccttancggccgcccgggcaggtccttagccaaagaatgcagtggagccttcccccnggggctgcattgtgaatgaataccaattgacagcataaaaattaatagtcccatatcagatctggaaggggtttctggggctgtctgatgtccctatcctgttgtagtgaacacaatagcagaaaattctttctgggtccatctgctataaagtcttggtaaaacagcattactatgaagaggatgaactcacctaccttcanatggaggaaaagtgaaaaggacttaggctttagtcctccatgacttttcttaagcactacctacctgtaataagctgagtgcaaaaggatgccgaagaaaatctgcacccagaagctgttagaaagcactgcagangaacagggnatgaataaaataaanagntcttaataaacccttaagattctttgntcaaggggnactttgccaaaaggggcagaatangngggnaaagagttgcttttaatctagctctacactggcntttgaaaataaaatttgcccatttngaaatatatngggntataattaaaatgnggctttttacactggnggggctatataaaaactgggtagnnaaatttccaccgagcatntatggngatttgntcacagnaaacctccgggcnggacccacgctaagggnggaattccagcnacantgggggggncngntacctanagtggatcccnagnctnggggnccccnaanctttgggggngtnaatc

SEQ ID NO: 1663 - DNA, 585 bp, Homo sapiens
ttgggccctctagatgcatgctcgagcggccgccagtgtgatggatatctgcagaattcgcccttgccgcccgggcaggtgatggatgaggagcaaaaactttatacggatgatgaagatgatatctacaaggctaataacattgcctatgaagatgtggtcgggggagaagactggaacccagtagaggagaaaatagagagtcaaacccaggaagaggtgagagacagcaaagagaatatagaaaaaaatgaacaaatcaacgatgagatgaaacgctcagggcagcttggcatccaggaagaagatcttcggaaagagagtaaagaccaactctcagatgatgtctccaaagtaattgcctatttgaaaaggttagtaaatgctgcaggaagtgggaggttacagaatgggcaaaatggggaaagggccaccaggctttttgagaaacctcttgattctcagtctatttatcagacctcggccgcgaccacgctaagggcgaattccagcacactggcggccgttactagtggatccgagctcggtaccaagcttggcgtaatcatggtcatagctgtttcc

SEQ ID NO: 1664 - DNA, 999 bp, Homo sapiens
  misc_feature 2, 5, 10, 22, 83, 150, 176, 189, 264, 275, 283, 286, 302,311, 318, 338, 374, 524, 528, 531, 536, 541, 606, 611, 614,616, 621, 634, 635, 636, 644, 659, 682, 688, 702, 715, 723,726, 768, 777, 779, 789, 796, 802, 810, 819, 831, 836: n = A,T,C or G
  misc_feature 853, 854, 869, 874, 893, 900, 903, 911, 989, 999: n = A,T,C or G
anccngctcnagcggccgccantgtgatggatatctgcagaattcgccctttcgagcgggccgcccgggcaggtctgacaatngattaaacaggcgacatgcaacccccactaaggttaaaagtccaaaactactcacacgcatctcttnattggggaaaagctgagactattatncattcttggtagncttgcaaccttgcatgaagagcacccattgcatttctttcatctttcagaaagcaccggtatctgttccaagggnctaacagtacnaaaatacnttntgggattacacctttnaaacccaanactgttntcattaaaaataattttggnttgtaacaaaattatgaaatacaatgcaagcacctnggtatagcattattactgaaaccacttaattcccagctttttgagttttttaaaaaaacccactgcactaagattcacaattcattgctacatacaaattaaagctagtaagaacacactaacgtcacaagtttctcattctaaagtgcnaaanccntaatngtctngaaagtggaacaggggtaaagggcaaaaattaaccccccccaccccaattaaagtttcctggaangtcantantnttttnaatccccaaaggnnncatttctntttaaaaaaattggntacctttggaactggggtaaagnaaaatnaggaacccctgggnggttttttttatnttttcttnaanccaaccccccaattccaccttaaaaacccccacccggggganggccaaaangnccacccttgnggaaacncttttngtgggggncccggtcgnaaaacccaaccnccctntaaaaagggggggtcgnnaaaaaatttctcccnaaganaaacccacctttggggcgnggggacncgntttacccnttaaaatggggggaattccccgaaagcgtttgggggtaaccccaaaagacctttggggggggaaaaatgaatgggggnccattaaccn

SEQ ID NO: 1665 - DNA, 27 bp, Artificial Sequence
  PCR primer
gctaaaggtgaccccaagaaaccaaag

SEQ ID NO: 1666 - DNA, 37 bp, Artificial Sequence
  PCR primer
ctattaactcgagggagacagataaacagtttcttta

SEQ ID NO: 1667 - protein, 207 aa, Homo sapiens
MQHHHHHHAKGDPKKPKGKMSAYAFFVQTCREEHKKKNPEVPVNFAEFSKKCSERWKTMSGKEKSKFDEMAKADKVRYDREMKDYGPAKGGKKKKDPNAPKRPPSGFFLFCSEFRPKIKSTNPGISIGDVAKKLGEMWNNLNDSEKQPYITKAAKLKEKYEKDVADYKSKGKFDGAKGPAKVARKKVEEEDEEEEEEEEEEEEEEDE

SEQ ID NO: 1668 - DNA, 636 bp, Homo sapiens
catatgcagcatcaccaccatcaccacgctaaaggtgaccccaagaaaccaaagggcaagatgtccgcttatgccttctttgtgcagacatgcagagaagaacataagaagaaaaacccagaggtccctgtcaattttgcggaattttccaagaagtgctctgagaggtggaagacgatgtccgggaaagagaaatctaaatttgatgaaatggcaaaggcagataaagtgcgctatgatcgggaaatgaaggattatggaccagctaagggaggcaagaagaagaaggatcctaatgctcccaaaaggccaccgtctggattcttcctgttctgttcagaattccgccccaagatcaaatccacaaaccccggcatctctattggagacgtggcaaaaaagctgggtgagatgtggaataatttaaatgacagtgaaaagcagccttacatcactaaggcggcaaagctgaaggagaagtatgagaaggatgttgctgactataagtcgaaaggaaagtttgatggtgcaaagggtccagctaaagttgcccggaaaaaggtggaagaggaagatgaagaagaggaggaggaagaagaggaggaggaggaggaggaggatgaataatgactcgag

SEQ ID NO: 1669 - DNA, 2821 bp, Homo sapiens
ccacgcgtccgcgccgcgcggcgcaggggaggcgagaggcgccccccggtggagagcctgagccccgcgcaagtctggcggcacctggcgagcggagccggagtcgggctggggaccgcggggttgaggccggaccgcggcggggtcgggggagaaacgcgcgctgccctggcacgggccccaaccccccggccgcgcggaatggtatggcccggccggagttaaggccggggggaggcggcgagtcccgcggcggcggcgacgatggggctgcgtgcaggaggaacgctgggcagggccggcgcgggtcggggggcgcccgaggggcccgggccgagcggcggcgcgcagggcggcagcatccactcgggccgcatcgccgcggtgcacaacgtgccgctgagcgtgctcatccggccgctgccgtccgtgttggaccccgccaaggtgcagagcctcgtggacacgatccgggaggacccagacagcgtgccccccatcgatgtcctctggatcaaaggggcccagggaggtgactacttctactcctttgggggctgccaccgctacgcggcctaccagcaactgcagcgagagaccatccccgccaagcttgtccagtccactctctcagacctaagggtgtacctgggagcatccacaccagacttgcagtagcagcctccttggcacctgctgccaccttcaagagcccagaagacacacctggcctccagcaggctgggccatgcagaagggatagcaggggtgcattctctttgcacctggcgagagggtctgactctgggcacccctctcaccggctacaaggccttggactcactgtacagtgtgggagccccagttcccacctctgtgacaataggatcatggccttacccttgaagcattaccgagaaggagaacagagatgggcttgaagagccacgtgctgccggctccaaattcccaaggacaaggatccctctgcatttttgtctatgtaacctcttatatggactacattcagctgcaaggaaaggaaaaccttgattgcagtggtttaaacaaacagaagattgtttttccacatagcatggattctggagatgggtggctaatggtattggttcaacaactccacgaaggtaggggtcacgtcttggatccttttgccttaatctcagtgctcgttacttcatggtcccaagatggctgctgtatccccaagaatcatgtctgcgttcaaggaaggaggggtggaggaagaggaagggccaaactagctggacccgtcaccttctatcagaaagtaaaacctcgtcagaagtctgtttcctgctctctccctctgcatatcttcacttagatgcccttggcccgagccagctaccattgcacctctagctgcaaacaaagctaagacagcagggaacagaattgtcatggctgaatagaccaatcgtgttccatctactgagactggcacactgcctcctgcaataaaactgggatcccattaccaagagagaaatgcagaattgtgtaccagttagcttttgctgtgtaacaaaccatccccaaacttggcagctagaaacaaaccctgtattttcccacaatcctatgggttggcaatttgggctgggctcaacagggcagttctgctgctcacacctgggatccctcatggagctaaggtcagctgttacctcagctgggcctggatggtctaggatagccttactcacttgcctggcaggtgacaggctgttggctggaattgcttggttctcctccatgtggcctctccagcaggctagctcaggcttattcacatgatggcttcaggattccaaagagagtgagagtagaagctgaaagacttcttgagttcttggcctggaactgggactaggacagtgtcacttctgctaagttcttttggtcagagcaaatcacaaggctttacccagattcaagggatgagaaacagactacatgtcttgatgaggggaaccacaaagagcttgtggccatttttcacctatcacaaataattttggatgggtatttatttggataaaggtatttccctcttccccctttctctctgtctcatggggcctcactctgccaagttggaaggcactaagacattgtcctggccctcagggtctaggggaagaggtgttggggcaggaagtgagtctctccatgggctggacccactgtagtaggagtgcctccttgtctgcactgctggtatggggttaggccaggtaggacattccagaggggcttctgaaaaccaagagtccctggggaaagggaacagagtaaggcaggccttgttctcactgccctctaagggaacttggtcactcggcacttttaagcctcagtttctccagttcaataataaggacaagagcttttcccatgcattctctttccccgggaaagttgactgaggtgaccagtaatagaattgaaaagggagagtgtcttcagtgcaatgtggcatcctggattgggtcttggaacaaaaacaggacattagtgggaaaattggaaatctgaaaaaagtctgaattttagttaatataccaatttcagtctcttggttttgacagatgtaccatggtgatgtaagatgttgaccttggggtaggctgggtgaagggtatacaggaactctttgtactatctctgcaacttctctgtaaatctagtatcattccaaaataaaagtttatttaatttaaaaaaaaaaaaaaaaaaaaaaaaaaaaaaaaaaaaaaaaaaaaaaaaaaaaaaa

SEQ ID NO: 1670 - protein, 137 aa, Homo sapiens
MGLRAGGTLGRAGAGRGAPEGPGPSGGAQGGSIHSGRIAAVHNVPLSVLIRPLPSVLDPAKVQSLVDTIREDPDSVPPIDVLWIKGAQGGDYFYSFGGCHRYAAYQQLQRETIPAKLVQSTLSDLRVYLGASTPDLQ

SEQ ID NO: 1671 - protein, 109 aa, Homo sapiens [sequence omitted]

SEQ ID NO: 1672 - protein, 145 aa, Homo sapiens
MGLKSHVLPAPNSQGQGSLCIFVYVTSYMDYIQLQGKENLDCSGLNKQKIVFPHSMDSGDGWLMVLVQQLHEGRGHVLDPFALISVLVTSWSQDGCCIPKNHVCVQGRRGGGRGRAKLAGPVTFYQKVKPRQKSVSCSLPLHIFT

SEQ ID NO: 1673 - protein, 117 aa, Homo sapiens
MDYIQLQGKENLDCSGLNKQKIVFPHSMDSGDGWLMVLVQQLHEGRGHVLDPFALISVLVTSWSQDGCCIPKNHVCVQGRRGGGRGRAKLAGPVTFYQKVKPRQKSVSCSLPLHIFT

SEQ ID NO: 1674 - protein, 90 aa, Homo sapiens
MDSGDGWLMVLVQQLHEGRGHVLDPFALISVLVTSWSQDGCCIPKNHVCVQGRRGGGRGRAKLAGPVTFYQKVKPRQKSVSCSLPLHIFT

SEQ ID NO: 1675 - protein, 102 aa, Homo sapiens
MQNCVPVSFCCVTNHPQTWQLETNPVFSHNPMGWQFGLGSTGQFCCSHLGSLMELRSAVTSAGPGWSRIALLTCLAGDRLLAGIAWFSSMWPLQQASSGLFT

SEQ ID NO: 1676 - DNA, 1336 bp, Homo sapiens
ctctaagcagcatgtaacctggcctgcatccaggaaatagaggacttcggatccttctaaccctaccacccaactggccccagtacattcattctctcaggaaaaaaaacaaggtccccacagcaaagaaaaggaataggatcaagagatacgtggctgctggcagagcaagcatgaattcgatgacttcagcagttccggtggccaattctgtgttggtggtggcaccccacaatggttatcctgtgaccccaggaattatgtctcacgtgcccctgtatccaaacagccagccgcaagtccacctagttcctgggaacccacctagtttggtgtcgaatgtgaatgggcagcctgtgcagaaagctctgaaagaaggcaaaaccttgggggccatccagatcatcattggcctggctcacatcggcctcggctccatcatggcgacggttctcgtaggggaatacctgtctatttcattctacggaggctttcccttctggggaggcttgtggtttatcatttcaggatctctctccgtggcagcagaaaatcagccatattcttattgcctgctgtctggcagtttgggcttgaacatcgtcagtgcaatctgctctgcagttggagtcatactcttcatcacagatctaagtattccccacccatatgcctaccccgactattatccttacgcctggggtgtgaaccctggaatggcgatttctggcgtgctgctggtcttctgcctcctggagtttggcatcgcatgcgcatcttcccactttggctgccagttggtctgctgtcaatcaagcaatgtgagtgtcatctatccaaacatctatgcagcaaacccagtgatcaccccagaaccggtgacctcaccaccaagttattccagtgagatccaagcaaataagtaaggctacagattctggaagcatctttcactgggaccaaaagaagtcctcctccctttctgggcttccataacccaggtcgttcctgttctgacagctgaggaaacgtctctcccactgtttgtactctcaccttcattcttcaattcagtctaggaaaccatgctgtttctctatcaagaagaagacagagattttaaacagatgttaaccaagagggactccctagggcacatgcatcagcacatatgtgggcatccagcctctggggccttggcacacacacattcgtgtgctctgctgcatgtgagcttgtgggttagaggaacaaatatctagacattcaatcttcactctttcaattgtgcattcatttaataaatagatactgagcattcaatgtgaaaaaaaaa

SEQ ID NO: 1677 - protein, 250 aa, Homo sapiens
MNSMTSAVPVANSVLVVAPHNGYPVTPGIMSHVPLYPNSQPQVHLVPGNPPSLVSNVNGQPVQKALKEGKTLGAIQIIIGLAHIGLGSIMATVLVGEYLSISFYGGFPFWGGLWFIISGSLSVAAENQPYSYCLLSGSLGLNIVSAICSAVGVILFITDLSIPHPYAYPDYYPYAWGVNPGMAISGVLLVFCLLEFGIACASSHFGCQLVCCQSSNVSVIYPNIYAANPVITPEPVTSPPSYSSEIQANK

SEQ ID NO: 1678 - protein, 177 aa, Homo sapiens
TRPRRAAQGRREAPPGGEPEPRASLAAPGERSRSRAGDRGVEAGPRRGRGRNARCPGTGPNPPAARNGMARPELRPGGGGESRGGGDDGAACRRNAGQGRRGSGGARGARAERRRAGRQHPLGPHRRGAQRAAERAHPAAAVRVGPRQGAEPRGHDPGGPRQRAPHRCPLDQRGPGR

SEQ ID NO: 1679 - protein, 42 aa, Homo sapiens
LVCCQSSNVSVIYPNIYAANPVITPEPVTSPPSYSSEIQANK

SEQ ID NO: 1680 - DNA, 717 bp, Homo sapiens
  misc_feature 22, 586, 687, 714: n = A,T,C or G
aaaagaatttttgctttctttntctctaaattttccttccgtgctttgatgcgggctcgtttctcacgttccagtctgggaaaatggtccacataaggcaaggcaaagaatcgtttcctattgtatcttttatttaggtgccaaggtataacccactgcttgaacttgtgccagatgattcttccaaagatgtctcttctccaagcaccaggtctagctctttcttgaccagtctgaagaagccttagggcatcttctctttcctggacaactttatctaatgcatccatggaatctactaccttatctaaccgctctggacttggcattggcaatctctgccgcttggcctcctgctctagggttagaagcatgtttctttctttcagtaagacataccaaagtttgtgtaaatcttcattacttttgttccttagttgctgacaggtccatgctgctccagattttactttttcttgcccccagttttttgggtcatcaaaaaattcttctagtcctttccttgacaatgtggtatgaagtaatctatattggtgaaaggatgtcacatttggtgtactcttangcaacaaactaagaaaaaaccctgtcaggcagggacctgaggagttattaacgaaccgggaagaattcagggcggatgaaactctcctaccaagaaagggncaaaccgggccgcagccatgttttccncat

SEQ ID NO: 1681 - DNA, 305 bp, Homo sapiens
ctgtacatttaacaaaatatgtgcaagactgtcatggtgaaaactacaaaacaatgataaaagaaattcaagaaaacaaataaatacaggggtatactatattcatgaattgggagaatcaatatcattattaagtctcctcagattgatctatagattcacagaaatcccaattcaaaccctatcaggactatttgtagaaatagacacactgatgataaaatttacatagaaacacaaaggaagcagaatagccaaaaattattggggaaaaaatgtagttgaaggattcccattactccttt

SEQ ID NO: 1682 - DNA, 498 bp, Homo sapiens
aaattacactccataaatttagacatatgtctctccaagtaagtacgagctgattgggaacgggctccaatggacatggctctgcagtcaaaatagttagcagatggacaggtttggaaaatgtgagggcccatatcatcataaccagcaataaggagaccaacaccatatggtctccggccatatcgttgtgttggtatctgggtctcttagactggttaacgagcttgttttaacaaggaatgaagtactgtctttattttcaaattatacattattaacaaaggtctctggcttattctttaattgttgcataatccaccagagaaataatgcaataggacactatttctttggcctaatataaaatgtttgactttctaccgaacctaagaaagagtgccagcaaaataatttcttcccatctaaaacctgatttgttttggatacaagggggtctaggatttcttgggacatctagaaccattaagaaacttt

SEQ ID NO: 1683 - DNA, 322 bp, Homo sapiens
aaaaattaaaaatagcacaattctacaattctgattttaccaagaaaataaaccttttttggcacatattatcctatgaaaatggaaagctgagtcaggctgctctgcttttcacagcacaaataagcattcatgctatcagacttgggaaattaactcggtgacaaaaattcactggaaaatagaatccttggaaaaatggggtcaggtgccatccactgagaggcaatgataatgtgtgtccttcgttattagcacaaagttaggcagcacactataattttagctacatgcaactctataggaacacatgtgggtaagg

SEQ ID NO: 1684 - DNA, 293 bp, Homo sapiens
  misc_feature 51, 182, 188, 195, 203, 220, 246: n = A,T,C or G
aaaagatgctgcttccctgttttcttccaggaacacagagaccaacacggnttcaaacacagggcgagcttctcactatttcctgggaatgttacttctcagcccaacacttctcttcccaagaagttcaagttttgagactgtttttctccccggaacagtacttaaaaaaaaaaaaatcnttgatnttcaaanatgggttnttttcgtgtcctggaanagcatcagtaactaaatatcaagttntccacaatgctgccccccctggggggctaaccggatgccaagggaga

SEQ ID NO: 1685 - DNA, 390 bp, Homo sapiens
aaattgtctaactcctatcccagtttctttttatagtctaaaaacaaggaatcacccaagtaagatactccttcagagcactgctgaaaacggatcaaacgtagagatcccccagatccctgttctcaagtgttaaaaatattttatattagcacatagaatacccttagatatattctgttatgttctaaagagtttgtgtttccccctttttgatgatgtcttcaatttcttctgagacctttcctgtatagtcatttggttctattgcttttaacttctcttgatactccagcggcaaaccattttcttttgcacccatgcaaataatctttttatactgtggggatgggggagcactttcgtaatttgtcatcagataacttcgac

SEQ ID NO: 1686 - DNA, 549 bp, Homo sapiens
gggtccagtccaacctgctcctcattattgtaaacatgtgcagaatcaatatggtggaacccggcttctattgccaatttgacggcctctagagctttacttttaggaacctgggggagcaaccaaacgtaatattttctgactaatgtgcctgagagttagttcgggcacaagcagcaacgttcacaaaaatcagcttttcctcctttcttggatgagctctgtatgtagaatcataagcccatcccagtctgactgggtctttcccatttagtaataaaggttgggcatagcaggaacttctgcagtcccagaaaaatcactgaaagtggaagtgtccccaaaacaatttcactttcagtgattttttggaaaaatcaacaggacgcaactatagttacagacataatcttaattatttttagtatggtgaaattaacacaaggaaatagccacatggaaggaattatgaaggaatgcagtgtaagctcctgtgattcctctcccaccatgttgcacagagcgcactgactttatccagcatcatat

SEQ ID NO: 1687 - DNA, 442 bp, Homo sapiens
  misc_feature 34, 50, 67, 382, 384, 385, 435: n = A,T,C or G
caactgcaaatgaagatcctttttggatacttgntgagaaagacacattngggggggggttgtgacnaaaataacgatggccggcttgatccccaagagctgttaccttgggtagtacctaataatcagggcattgcacaagaggaggcgcttcatctaattgatgaaatggatttgaatggtgacaaaaagctctctgaagaagagattctggaaaacccggacttgtttctcaccagtgaagccacagattatggcagacaggctccatgatgactatttctatcatgatgagctttaatctccgagcctgtctcagtagagtactggctccttttataatttgttaccagctttacttttgtgataaaatattgatgtngnnttttacactcttaagtcttaaccacagtcacaattatcttaatgtagatnataattg

SEQ ID NO: 1688 - DNA, 340 bp, Homo sapiens
  misc_feature 23, 52, 56, 58, 60, 62: n = A,T,C or G
ctgccagctaacagcaagagctntgagggcatcactgaacagatagcacctnatgngntntnatgattcaaaaatctcccttgctgttggatttaccaacacgtaggcttttatttcttcccattacatctgtttagccacagaaagcatcgggccatactcactgcagaagataagacttcctcagaatcttatttgtttagtgcactcaattttacttcactgtctcatcacttgagagactggttaaggcaagaaacccatttcttaacattttttttgttttcaaacatttgaaaagcaacaccaaaacgtatgcagttaattcctcaattctttc

SEQ ID NO: 1689 - DNA, 140 bp, Homo sapiens
  misc_feature 61: n = A,T,C or G
ccagagggcctgcacatgcaatttccagtccctgccttcagagagctgaaaagggggcctnggtcttttatttcagggctttgcatgcgctctattccccctctgcctctccccaccttctttggagcaaggagatgcag

SEQ ID NO: 1690 - DNA, 485 bp, Homo sapiens
gagattattacccagaattcacatgtagggatggggaaggacaatttttttttaactaaaaaagttggcggcaggggtggggggtggcaatcatttttcttcctatacatacaaaggatattgtcaaaaatggcgttcttctcttgtggcctgttattctgattgctgctgtatacagttttgtcactctttagtttttagttaagcatactgatagactttcctctaaaagccattcactccagattttacctggggaatattctacatactgcttactttctctataaaactcatcaataaatcatgaaaggcactgagttttgtaaatcaggaccctaaatgtttaattgtaaataagtttcagataattattatagctttgcgttgaagtttgttgttttttttctcaactagttaagtcaactgcttctgaaataactctgtattgtagattatgcagatctttacaggcataaatattt

SEQ ID NO: 1691 - DNA, 342 bp, Homo sapiens
  misc_feature 11, 24, 26, 49, 50, 51, 53, 61, 62, 142, 173, 190, 193, 242,250, 291, 303, 304, 315, 329: n = A,T,C or G
gaagaaacaangatgacttttttnanaacaaagcataatgctggcaatnnngnggggggtnnagttttccaaacatgttatcttaaatacccctttatccttacaggttgacataactttgaatgttttaacagcaagaatnttaagaaaagataaacaccattttatttatntataaaaacaaaattanttncaaatatttttgacattgtgattttttttttccacatttctcagcaaanctaatggnattttaatcattatttttgcctgtcataagaaaactcttanctgaaatggccnnaaaactgtganacatgctatggaanctgaatgccggac

SEQ ID NO: 1692 - DNA, 450 bp, Homo sapiens
  misc_feature 23, 59, 60, 409, 417: n = A,T,C or G
aaaaatggggccccaaagactgntaagagctcatccccgtggtctcctatcaccggggnnggggttcatgtctgatgagaagcttggacggtactgaaactcatacatgtaggtgggtgctccagcatctctgtggttccgggccacaatcacagatgggacaccaaacatcacatctgctatcaagtccaggaacaggtctttctttttgacagtgtcgtctgttcctcctaagtatttctcagtggcttctggaatcagttccttagcaatgcaaacaaggggataggacttccacaggagtgacatggctgtcttctggtccagttgcccttcggagagtggatagctcatcaactgcattggaatcaaccagccaaactcctgcttgttaattccgaccatgtangggacagngtggaaattcctttcagcttgaaagctcttcag

SEQ ID NO: 1693 - DNA, 436 bp, Homo sapiens
  misc_feature 20, 51, 52, 58, 62, 286, 323, 333, 375, 385, 399, 401, 402,407, 410, 426, 432: n = A,T,C or G
ctattttattaacatcatgntttaataaataactggctacttctaataaanngggggnctcngtttacaacagcccccaatattccattttgaccactctgcagaatttggtgtaaaaagttgaatgaaatgtagaccctgagctatcaagtaattatgtttcaatataaaaatagagaattactcttacaactgaagattgaacaataacacaaacaacctctttgtgggttttaggttcggtaaaattagttgggatcttaatggctgtctaaagcaggaaganacagaattttaatctttctgaagacttctgggaactnctttgaaagngatttgttaccttatcagagtttatgagctattattttggtnaaggcacaangaaaggattcccangnngttgntantcttttgccctggacnacaaanattg

SEQ ID NO: 1694 - DNA, 313 bp, Homo sapiens
  misc_feature 29, 32, 34: n = A,T,C or G
attatctgcaaggtttttttgtgtgtgtnttngnttttattttcaatatgcaagttaggcttaatttttttatctaatgatcatcatgaaatgaataagagggcttaagaatttgtccatttgcattcggaaaagaatgaccagcaaaaggtttactaatacctctccctttggggatttaatgtctggtgctgccgcctgagtttcaagaattaaagctgcaagaggactccaggagcaaaagaaacacaatatagagggttggagttgttagcaatttcattcaaaatgccaactggagaagtctgttttt

SEQ ID NO: 1695 - DNA, 522 bp, Homo sapiens
ccattttcaggggaagcttgggagagcaatagtatggtgagccccttagagatgagcgcctactccttcttggcgaatgctgccttcagatgcttaccaagtggtcactgcatctagtaagattatatttccagtacacttccttagggcagaaacaccatcctatcaggtttggtcagtcccttcttcatgaagggagtcatggggaattcctgaaaattttcttccttctgcagacagttggatgagtcccttagagaaggcatccagagacataactaaactgaatatcatcccatattgattttaggaattgactctaaaactctgtgcagaatcttgtgttgggattgtatcttgacattcctgttgtgttatttttcttaactggagtgtgtgctgcctttcaggtacaatttttgtgtaataaaagccagtgcattaagtttatatagactactttctatgcaagactgagatatggaatagataggaagagatatgtactgctgggtacatgga

SEQ ID NO: 1696 - DNA, 174 bp, Homo sapiens
  misc_feature 52, 55: n = A,T,C or G
ccagccattgcctggcatttggtagtatagtatgattctcaccattatttgncanggaggcagacatacaccagaaatgggggagaaacagtacatatctttctgtctttagtttattgtgtgctggtctaagcaagctgagatcatttgcaatggaaaacacgtaacttgttt

SEQ ID NO: 1697 - DNA, 561 bp, Homo sapiens
  misc_feature 22, 55, 56, 198, 265, 374, 378, 399, 410, 465, 543, 549: n = A,T,C or G
ctgtaatgttattgcagatccncatctctcgctcaactgttaatgtctcaacctnnagaggcaccccacccagcacactgtcagtaaaggggcagattgaaacagtgagagttaagggtacagtagaaaattctgcatgtttgcagtgactagaatcagatagtagtgtggtggtttttttttttaatcattatgaanagtgggagcttgcaggtaaggcttctgtggtggtttgaaaagcagaaagcaataaatgaaacaaagngtttgtgtaatatattcctgccttgtcttcttcactcagagttgaaataggttttgcagtaaagctggaaaaaaaaagaaaacaaatgttcaaaactgtgtgtgttggngggnggaatttcctttgcttatagnagtttcagagnaactatatgttttttttcctttctttttcacaggcacagaaaactgaatctgtanataacgagggaaaatgaattgcatgaaaaattggggttgattttatgtatctcttgggacaacttttcctcggccgcnaccacnctaagggcgaat

SEQ ID NO: 1698 - DNA, 267 bp, Homo sapiens
  misc_feature 58, 62, 63: n = A,T,C or G
cgaggtctgccctcgattgtgtatttctgttggatcaaacactcccatgttaccactnggcnncataatgtatcgatatatattccaagtggcaacaggtaagttgagaaggaagatgaaccagtgcaatgacatgagcagtaatacagtgacaatggtatggccacttaaattaaaaatataacaaaattgaaaaatagacatataaccaaaaagattctaaatcttgcaaggaaaaaaagaataaagctgccaataagttatttt

SEQ ID NO: 1699 - DNA, 449 bp, Homo sapiens
tgttaagattttttttgctacaaagaggaggtggcaatggtagatccacccttatgcttctcagtttagcataacctcttatggattttcatcaaattcagcgtgttggtcactggaaagagccttttccttctccttttcttactctcccctcatggtgttcccctcttaaaggagaggagcttttaatttacacttaccacctcatttgcttttctggaggccatgcaatataggcgggactacagagttaatctcctttttacaaatgaggccaagagaagcctcattggttcacagtcatgcagctcatactgtccacccttgtattctcagatgcaggacaattgcattttagttttattttgtggaggtgcagaatatttactctttctgtccaacccttgattctgccgaggaagacactgatggtttgatgagtgattcag

SEQ ID NO: 1700 - DNA, 398 bp, Homo sapiens
acatttcacaaataagatgtagctttccaaacaaatccattcgatgaccattatcacaactatattttattctaatttataaaacaaaaaatggttagacaagcacatgatatcaagagtcttcaacacagtggattccattttattaagaaaaaaaatagaaaacaagtagtccttaaattgtcttagctctccatagcatacgttatataaaattaaagttttgcttccaaaaatatgtttccatgtggtcgtggtgttgtccagtgctattagggccaaagcaccaaagacatgagaagtttaaccatcgacttgtcatttttcataaaagctaaacatttccttataggtctggagtaaaatcttctaggcattttagtgctaaaagtcacttt

SEQ ID NO: 1701 - DNA, 257 bp, Homo sapiens
  misc_feature 4, 12, 13, 27, 47, 53, 61, 63, 76, 77, 78, 79, 86, 87, 88,89, 92, 93, 97, 100, 101, 103, 127, 129, 130, 133, 134,141, 142, 143, 147, 149, 152, 155, 164, 166, 174, 185, 188,194, 203, 205, 220, 228, 237, 238, 240, 241, 246, 251: n = A,T,C or G
aaanaacactannggaccttagagatnataactgtttgataatttgnctcagncgtattgncntaaaagatatatnnnnggggggnnnntcnntgtnaanngntgtttggattgcctgatattatancnnggnngttgggnnntatntnacncantatacctcngncgcaaccncgctaatggcnagnatcatnacactggcngncgttactactggatncgagctcngtgccaatnncnncgtcntcatngcccta

SEQ ID NO: 1702 - DNA, 526 bp, Homo sapiens
  misc_feature 9, 476: n = A,T,C or G
acctaattnattgaagtaataaccaaataattttcaatcttgattcaactgtgattcaaatcttacaccatttgcccacttctatgaattttatgtataaaattttttaagagtcagagttttttttcttgattaattggatgtatttcacagaatttccaactgctcacgttagttttcttccttttagagttgatctctctaatgtattagatcttcatgcctttgatagtctctctggaataagtttgcagaaaaaacttcagcatgtgccaggaacacaacctcaccttgatcagagtattgttacaatcacatttgacgtaccaggaaatgcaaaggaagaacatcttaatatggttattcagaatcttctgtgggaaaagaatgtgagaaacaaggacaatcactgcatggaggtcataaggctgaagggattggtgtcaatcaacgacaaatcacaacgagtgattgtncaggggggtccatgagctctggtgatccgggaggagactccaatgagctg

SEQ ID NO: 1703 - DNA, 116 bp, Homo sapiens
gacctccgaactgagctctaatttagctgatcagattttgcttgggtaaagttcctttttaatgttctaaagtgtttacggttctcaaatatcagttaaaaactaattttaggtgg

SEQ ID NO: 1704 - DNA, 241 bp, Homo sapiens
  misc_feature 209, 230, 235: n = A,T,C or G
aaaaattgtgtaattgttaaatgtccagttttgctctgttttgcctgaagttttagtatttgttttctaggtggacctctgaaaaccaaaccagtacctggggaggttagatgtgtgtttcaggcttggagtgtatgagtggttttgcttgtattttcctccagagattttgaactttaataattgcgtgtgtgttttttttttttttnaaggggctttgtttttttttntcaanaaaaat

SEQ ID NO: 1705 - DNA, 336 bp, Homo sapiens
  misc_feature 9, 12: n = A,T,C or G
ggtcctgtntanacacacatcaatatgaaacaaaaaaaatttatataaataagtcaattaaacttcacaaaaactaaagaaacacaagacaaaaatccaacaagcaataaaaactgtacaatattggtcagtcttttatatctgaaaaatgtgtaacttaaaaaaaagttatttatcgtataaaaaaagtcttttacatctgtgttagctggagtgaaaacttgaagactcagactcagtggaaacagatgaatgtccacctcgctttcctttggagaggatcttgaggctggaccctctgctcacagaggtgagtgcgtgctgggcagaggtttt

SEQ ID NO: 1706 - DNA, 107 bp, Homo sapiens
agggtggctctgggagcagttgtgctgcgggcttgctgggggagaactctaactgttgcagaaacagagcttcatggcttgcttaaattacttagctggaatatttt

SEQ ID NO: 1707 - DNA, 512 bp, Homo sapiens
  misc_feature 468, 470: n = A,T,C or G
ttttttgtctggtaattatatatttattatttagcaaaactgaagaaaaaaagcacagaattgtttcaacagatgtctctcattttcagctagcatttctctcccaagttgagctggtttaatgtgttttggatttccctcctcaattggcttattttttagatcacctgcaattcatttgcaaattgcaataaaacacattttagaaaaaaggaaccttcaattattagctttgtttctttttaaatgtatatattttgactaatgtttgtgaatgaagttggctaacatgtatttagtttcattttggcggtatgtaatataaagtttttaaaattttaaatatggttttaacctttatgtgtaaatgattttctagtgtgaccttctaatttaatattagacgtctaaggtatatctgtaaattagaatccgactatcactctgttcattttttttgaacaaagngnttaaagaaagcctgaaccagggaaaaaaaaaaaaaaaaaaaa

SEQ ID NO: 1708 - DNA, 203 bp, Homo sapiens
  misc_feature 28, 36: n = A,T,C or G
aatcttctaaaggaagaacagacccccnagaataanattacagttgttggggttggtgctgttggcatggcctgtgccatcagtatcttaatgaagactataatgtaactgcaaactccaagctggtcattatcacggctggggcacgtcagcaagagggagaaagccgtcttaatttggtccagcgtaacgtgaacatcttt

SEQ ID NO: 1709 - DNA, 271 bp, Homo sapiens
  misc_feature 1: n = A,T,C or G
ngttgaaaaaatagatccaatcagtttataccctagttagtgttttgcctcacctaataggctgggagactgaagactcagcccgggtggggctgcagaaaaatgattggccccagtccccttgtttgtcccttctacaggcatgaggaatctgggaggccctgagacagggattgtgcttcattccaatctattgcttcaccatggccttatgaggcaggtgagagatgtttgaatttttctcttccttttagtattcttagttcttcag

SEQ ID NO: 1710 - DNA, 239 bp, Homo sapiens
  misc_feature 58: n = A,T,C or G
tacaaaatattttaattgtaagtggtcagaggaattcttctggtttctcccttatggntatttttaatttgtacaatagttgcttctgtcaactcagcgacaatgccatcatagctttcaaatgagatcaccctgtagatcgatggactatgccttaaagttgcagatgcataaaggagactgaggacaaatggtgaaaactgtagttactgaacccaaatgttactcagagatatcaa

SEQ ID NO: 1711 - DNA, 122 bp, Homo sapiens
agtgtaagtgaacacagaagagtgacatgtttacaaacctcaagccagccttgctcctggctggggcctgttgaagatgcttgtattttacttttccattgtaattgccatcgccatcacag

SEQ ID NO: 1712 - DNA, 169 bp, Homo sapiens
ttcccataaataaaagtacagttttcttggtggcagaatgaaaatcagcaacttctagcatatagactatataatcagattgacagtatatagaatatattatcagacaagatgaggaggtataaaagttactattgctcataatgacttacaggctaaaattagtttt

SEQ ID NO: 1713 - DNA, 392 bp, Homo sapiens
tgacagagaggatggcgctgtcgaccatagtctcccagaggaagcagataaagcggaaggctccccgtggctttctaaagcgagtcttcaagcgaaagaagcctcaacttcgtctggagaaaagtggtgacttattggtccatctgaactgtttactgtttgttcatcgattagcagaagagtccaggacaaacgcttgtgcgagtaaatgtagagtcattaacaaggagcatgtactggccgcagcaaaggtaattctaaagaagagcagaggttagaagtcaaagaacatattcttgaaagttatgatgcattcttttgggtggtaacagatcataaagacattttttacacatcagttaatatgggattattaaatattggctataaaa

SEQ ID NO: 1714 - DNA, 301 bp, Homo sapiens
tgggagggatattttcccacaggaacaagggtctccgtgatgacacggggtctctatagtcatgttgagagcctaatggcccttggcataattgctggtgttggggtagaaggtgtcttggagtttgctcaagtggttgagagggagggaggtgccatagacttggaggaactggcacgaagccaaggatacaaatccaggcagggctgtggggcaggatagggagcagggccttctactgaaggagtgactcaggaaggaggaggggaaggtgacaagcccctgggcaggagccctgtgg

SEQ ID NO: 1715 - DNA, 194 bp, Homo sapiens
taaattcaggctaacttctgaaaatcccgttttattcacctcactgtggtaccagtaactatactgagtcaggttactttacagttaactatgtcacctaaaacacaataatccattaacactctaataacagttattgggtgtggtcatactggaaattcttaaccatatagttgtcttgccaattttttttt

SEQ ID NO: 1716 - DNA, 185 bp, Homo sapiens
gtaggaatgggttcttggtacacaagatagtattgttgagctagttttcgagctctgtgcacaagcactctttaattcccacggacggggctcctccagctacagcagccaaagcatattcaatctggacaagtttaccagacgggctgaatgtagtcagcgaaaaactgtacccgcgctccgcc

SEQ ID NO: 1717 - DNA, 296 bp, Homo sapiens
  misc_feature 3: n = A,T,C or G
aanaggctcttggtggagaggactgtgaagccgtcggcaggtgtgccctcggttgtgccgtcggcgctggctgccttactgacttcaccctgcttcttcttggatttccgggcccctttcttgcctcctgcttttttagatgcaggcttcttctgggatggagacttggcctttttggctgggggtggtgtgatgatggcttccaactttcctttggatccccgcttcttcgctagcaactcggggtggatgttgggtaacacacccccactggctatggtgactccttttagcag

SEQ ID NO: 1718 - DNA, 343 bp, Homo sapiens
  misc_feature 208, 322, 341: n = A,T,C or G
atggcattaattgttccttgcttttatagggtgtattttgtacattttggatttctttatataaggtcatagattcttgagctgttgtggtttttagtgcacttaatattagcttgcttaaggcatacttttaatcaagtagaacaaaaactattatcaccaggatttatacatacagagattgtagtatttagtatatgaaatattntgaatacacatctctgtcagtgtgaaaattcagcggcagtgtgtccatcatattaaaaatatacaagctacagttgtccagatcactgaattggaacttttctcctgcatgtgnatatatgtcaaattgtcangc

SEQ ID NO: 1719 - DNA, 193 bp, Homo sapiens
tcgaggacccccgagatgcagaggatgctatttatggaagaaatggttatgattatggccagtgtcggcttcgtgtggagttccccaggacttatggaggtcggggtgggtggccccgtggtgggaggaatgggcctcctacaagaagatctgatttccgagttcttgtttcaggacttcctccgtcaggcag

SEQ ID NO: 1720 - DNA, 176 bp, Homo sapiens
  misc_feature 30, 91, 145, 168, 170: n = A,T,C or G
tgattcagaattttttttaatgaaaggatnattgcactaaccttcttcctgctgctctgattctgcatttgtggtacttgtgactacgttntttcaaatatagatagatttaagctgctaatttttttttttttagtaaccactnctatatcatgtcttttactctgntnataata

SEQ ID NO: 1721 - DNA, 128 bp, Homo sapiens
  misc_feature 9: n = A,T,C or G
tattcttangaaacttccctaatcccttggaaattcccgggtccttcaagaataaaaaaaaaagggtcaagaagaacaaattaccaaagggaaagaatggctttcaatataataaggtccatttttta

SEQ ID NO: 1722 - DNA, 285 bp, Homo sapiens
  misc_feature 34, 140, 165, 170, 230, 255: n = A,T,C or G
ttatgaagttgacaaataaataaaaggtagtggntatgtctgagcttattgtgtttgagctaacaccaggttactcagtaaccatgacctgctcctccatttccatttattctcaacattaaatagttttatcttgttgntgccagaaatgcacttgtgccaggnattgnccctgctgtatgaaaagcttcttggcaatgaattctgtaataagtgccctacattatggntttctggtggaattggtttaacagngacaacccaggatttccaatatatttttgt

SEQ ID NO: 1723 - DNA, 536 bp, Homo sapiens
  misc_feature 33, 66, 67, 68, 406, 437, 450, 462, 498, 515, 516: n = A,T,C or G
cttggcttgcaggtggcaccttctcactatgtnctcacatggccttttctctgtggagagggacannnagcatgagcaggctctggtgtctcctcttcttataaagacactaatatcaccatattagggcttaaacctatgacctcatttaaccttaaccccttaaaggtcccatctccaaaaacagtcacatagcaggctactgcttcaacatatgcatttgggggaggggacaccattcagttcttaacagggtggtcaccgcaaacatggaaagtcagagccttctccccttcagaattcccgcccccacccagggatggggaagaggagcagagaggtatgggaagcagacacggagagtggcaggtaccatgctggggtgggctcaggagtgctttcgganggacatatggaactggcagggctcaatgcanggagggcggaagnccttgggaagancccgtggcctgagaaaggggctgggctacaaccctnggcaagttactttaccnntgaccttcgatgcttttggg

SEQ ID NO: 1724 - DNA, 145 bp, Homo sapiens
  misc_feature 4, 12, 27, 32, 45, 47, 48, 59, 61, 65, 93, 98, 103, 121: n = A,T,C or G
ctgnccttttgnaacaggaccctcacnctatncaatggggggttnanntgaagcatgancntatncatgcggaaaacccaactcatgtgagcncaaancggancgacccagacaaccatgnatgcggctaatatggggagagaaa

SEQ ID NO: 1725 - DNA, 173 bp, Homo sapiens
caattctggaattacccacttgtttaattttgagcaacatgatctagcattaatgtagtcacattctaaatcagacaatgtaattatgaagtagaccgagaggaagatgagcgcgcaacaatcgaggagagagaagacgaacaccaccgcctccatcctcctcctccgtcgcc

SEQ ID NO: 1726 - DNA, 302 bp, Homo sapiens
acccgttggaaatgggccatggtctaatttggtgttgaaataaactaacctctttggctgtttctcccaaactgccaccagccaggcaaggccaatccaatactgactgctggctgggggagctcgtaatgggtgatgccgccctgctttttgcatatgtcaggctaacaggtgctttatttccagagaattgttaatgcccttttttgaaaagagcagcagaaattccggacaagaatctgaaaaataggtgtcaaaaactatttcccagaaggtagctgtacaggagtttgagtctccag

SEQ ID NO: 1727 - DNA, 274 bp, Homo sapiens
  misc_feature 3, 4: n = A,T,C or G
ttnngttgaaaaaatagatccaatcagtttataccctagttagtgttttgcctcacctaataggctgggagactgaagactcagcccgggtggggctgcagaaaaatgattggccccagtccccttgtttgtcccttctacaggcatgaggaatctgggaggccctgagacagggattgtgcttcattccaatctattgcttcaccatggccttatgaggcaggtgagagatgtttgaatttttctcttccttttagtattcttagttcttcag

SEQ ID NO: 1728 - DNA, 415 bp, Homo sapiens
aaatccctttctgcttccactggaggcaaaactgaacaaaatgttagttaaatagagagagcagcatttctaagaaatctgtggtcagcattatagaccatctatgctacaaggatgtcattaaataggatttgttcaattactggattcttcttctatgatcagttatagaatttctggtttatatctctgattcataaaactgggactccactttttgaagatacatctgattgatttttttcagtcatgatttaacagacttctttgagatgctcattttaacatttacataatttataatcccaaatgtataaaagacaatgaaaaaagcatcataaataaataatgcaaaatgaaatagttatgtcagacttttggaccttctgataaattagcaaaactgtaacagaaa

SEQ ID NO: 1729 - DNA, 309 bp, Homo sapiens
  misc_feature 4: n = A,T,C or G
acanaccgtatactttatgcaaacaaagtgatgcctcactgacttaggagacaagtcacatgccatcagtgtgtcagaaaatttctttcttcagtgatagttaaggtaacctcgccagctactttccagagacagctccagggcaatactggggaaaaaaaaatcagagacataggaccccaatagagccctgtgcaacaaaaagatgctagataacaaaactcaaagcaaaactaagatcattccaatttaggggaaagtttttttattcagtgtttaagattaaaaactacaagattttgcttgcag

SEQ ID NO: 1730 - DNA, 285 bp, Homo sapiens
  misc_feature 2: n = A,T,C or G
anctgtactgtatttatgttgctattggtcaaaagagatccactgttgcccagttggtgaagagacttacagatgcagatgccatgaagtacaccattgtggtgtcggctacggcctcggatgctgccccacttcagtacctggctccttactctggctgctccatgggagagtattttagagacaatggcaaacatgctttgatcatctatgacgacttatccaaacaggctgttgcttaccgtcagatgtctctgttgctccgccgaccccctggtcgtgagg

SEQ ID NO: 1731 - DNA, 244 bp, Homo sapiens
cattaccttgctaaaatttccactaagctacagcttcagatatttacaagaaaaataaatatcttttaacagacttcaatgtggtttaacagcaagctagctgaggagttgtattttgttgttatttcaggtaactttttattaagaaacagttaatatttcagcgattacaatttcaggtgttcaaaactcaagaagggtcatcattatactctgaagcagaattcttcaggtactcatcttt

SEQ ID NO: 1732 - DNA, 272 bp, Homo sapiens
  misc_feature 9, 65, 192, 210, 212: n = A,T,C or G
ctgggaagncagttcgttctctcctctcctctcttcttgtttgaacatggtgcggactaaagcanacagtgttccaggcacttacagaaaagtggtggctgctcgagcccccagaaaggtgcttggttcttccacctctgccactaattcgacatcagtttcatcggaggaaagctgaaaataaatatgcangagggaaccccgtttgcntncgcccaactcccaagtggcaaaaaggaattggagaattctttatgttgtcccctaaagat

SEQ ID NO: 1733 - DNA, 388 bp, Homo sapiens
  misc_feature 2: n = A,T,C or G
anttggaagagcatatgaacacgggccagctagcaggattttcacatcaaattagaagtctgattttgaataatatcatcaataagaaggagtttgggattttggcaaagaccaaatactttcaaatgttgaagatgcatgcgatgaataccaacaatatcactgagctagtgaactatttggcaaatgacttaagtttagatgaagcttcagtcttgataactgaatattcaaagcactgcgggaaacctgtgcctccagacactgctccctgtgaaattctgaagatgtttcttagtggattatcgtaaatcactgaacctttttttcaagaaggacaagaattttggagtctgctattaatgggaccatatttattacagttttt

SEQ ID NO: 1734 - DNA, 282 bp, Homo sapiens
tttggaatgtaaaattaatggtatctggtatcaagttgtaagaaaaactcccccagattgggaggtaactgagtgatatgtgaaagaatcttcccgtctgaatttaagaatacacctacactgggcagaaaaaggtgggggagaggaagtagaagtagaggaaaagcacaactccactggcttcaatcaaactgaggtaactaattagagacggaaaataaataaatcaacaaatgccccatttttgttttccaaaaaagatcactggcaactaacaatttt

SEQ ID NO: 1735 - DNA, 268 bp, Homo sapiens
  misc_feature 1: n = A,T,C or G
ntaagccagccttcctcaagaatgccagacagtggacagagaagcatgcaagacagaaacaaaaggctgatgaggaagagatgcttgataatctaccagaggctggtgactccagagtacacaactcaacacagaaaaggaaggccagtcagctagtaggcatagaaaagaaatttcatcctgatgtttaggggacttgtcctggttcatcttagttaatgtgttctttgccaaggtgatctaagttgcctaccttgaattttttttt

SEQ ID NO: 1736 - DNA, 478 bp, Homo sapiens
  misc_feature 2: n = A,T,C or G
tnatagacttttccaatggcccccttataacaccagaaaggattgtaatcttgggcgtattttgtgctggcatctttggcagttgtgaagatcttgtaccagagcgtggcgttgctgtacgtgtcaggaacacagtgcggtggctgtacagtgacggggaacaccccagggctggccgtgagggtcatgcaggctgtgaataccacctgctcacagtgaccgtggagggcgcagtcatctgagctccacgctgtaggcagggtgaaggtgatgtttatctcctcgtgggcttccctgcctgaaagtccaatctgatgccctaagatggttgagtacagatgggtgacgttgcgggaataccctccgaagggtttcagtgggtccagggttagggtgattgagactgagatattcaccgggcccgagtcctccagggcctggggggactgggtggaagctcgggcctgcccgctggtca

SEQ ID NO: 1737 - DNA, 489 bp, Homo sapiens
  misc_feature 5: n = A,T,C or G
ctttnaggatggcgagtagcagcggctccaaggctgaattcattgtcggagggaaatataaactggtacggaagatcgggtctggctccttcggggacatctatttggcgatcaacatcaccaacggcgaggaagtggcagtgaagctagaatctcagaaggccaggcatccccagttgctgtacgagagcaagctctataagattcttcaaggtggggttggcatcccccacatacggtggtatggtcaggaaaaagactacaatgtactagtcatggatcttctgggacctagcctcgaagacctcttcaatttctgttcaagaaggttcacaatgaaaactgtacttatgttagctgaccagatgatcagtagaattgaatatgtgcatacaaagaattttatacacagagacattaaaccagataacttcctaatgggtattgggcgtcactgtaataagttattccttattgattttggtttgg

SEQ ID NO: 1738 - DNA, 262 bp, Homo sapiens
gttacagatgacatgtatgcagaacagacggaaaatccagagaatccattgagatgtcccatcaagctctatgatttctacctcttcaaatgcccccagagtgtgaaaggccggaatgacaccttttacctgacacctgagccagtggtggcccccaacagcccaatctggtactcagtccagcctatcagcagagagcagatgggacaaatgctgacacggatcctggtgataagagaaattcaggaggccatcgcagtgg

SEQ ID NO: 1739 - DNA, 422 bp, Homo sapiens
ccaccatccttttgagacagttcctatcaacaatcttgaaccatactaatacattacttgttcctgaagtccttttgttgtagctcataataaaataagcaatacaaatgaattatctgtatttaagggaaaagaaacatttacaagaaaacacaaaaatataactgttataattcattatgaataaatatacactttgaactggctaagtacaatctttatacattgtttaagatttaatacagtttattagccattttcttttttcacacaatgtatatcaaaattaaaaaaaaatactgatttatagaaaaatggcaaagtacagtagttccattccaatttgaagggccatgaaaagccactgcaagaccttttagcctaattcaaacctgtaaacatgttcagtcttttttacctgc

SEQ ID NO: 1740 - DNA, 92 bp, Homo sapiens
gctaaatacctatctaatgtgctatgtttatcaaatcgtgtactaaaatggaaagctagttttgagaaattattcagaagccttgttatttt

SEQ ID NO: 1741 - DNA, 188 bp, Homo sapiens
tttcaattcttccaaaaggctcaaagatcccacgaagcatatcttcagttatgttgaagtgtaatgagcccacataaagcctcataggtccagcacttcccttttgtaaattgtttgccattgctgcagctctgtttttttctgcctgtgatgcctgtactatgattggcacgcctaaaactcgttgg

SEQ ID NO: 1742 - DNA, 285 bp, Homo sapiens
  misc_feature 3: n = A,T,C or G
ttnaaaatactttcaggctccaccaaaacgtagaactgaaagcatgtattttggaagaaagagatacattttgtatgctttcttttccttttgtagattcccagtttattttctaagactgcaaagatcactttgtcaccagccctgggacctgagaccaagggggtgtcttgtgggcagtgagggggtgaggagaggctggcatgaggttcagtcattccagtgagctccaaagaggggccacctgttctcaaaagcatgttggggaccaggaggtaaaactgg

SEQ ID NO: 1743 - DNA, 117 bp, Homo sapiens
  misc_feature 2: n = A,T,C or G
angatctatagacactttaggcaaaacaggctcataaagcaattaaaaaatcaacaatttagtaaaaacaggctacatagtattttgtttttacgtttcatttgtctattgatcttt

SEQ ID NO: 1744 - DNA, 111 bp, Homo sapiens
aaacaatgggctaaaaataaacagtattaaaaggttaagtttatataatacatatgtacacaattagtggtgttttcttttcagacaaaatactgaaacaaatattagttt

SEQ ID NO: 1745 - DNA, 305 bp, Homo sapiens
ctgccagtagacccccggtcaccctgaggctggtggtccctgctagtcagtgtggctctctcattggaaaaggtggatgcaagatcaaggaaatacgagagagtacaggggctcaggtccaggtggcaggggatatgctacccaactcaactgagcgggccatcactattgctggcattccacaatccatcattgagtgtgtcaaacagatctgcgtggtcatgttggagtcccccccgaagggcgcgaccatcccgtaccggcccaagccgtccagctctccggtcatctttgcaggtggtcag

SEQ ID NO: 1746 - DNA, 319 bp, Homo sapiens
aaaataagtgaataagcgatatttattatctgcaaggtttttttgtgtgtgtttttgtttttattttcaatatgcaagttaggcttaatttttttatctaatgatcatcatgaaatgaataagagggcttaagaatttgtccatttgcattcggaaaagaatgaccagcaaaaggtttactaatacctctccctttggggatttaatgtctggtgctgccgcctgagtttcaagaattaaagctgcaagaggactccaggagcaaaagaaacacaatatagagggttggagttgttagcaatttcattcaaaatgccaa

SEQ ID NO: 1747 - DNA, 177 bp, Homo sapiens
aaatccttttcccataaataaaagtacagttttcttggtggcagaatgaaaatcagcaacttctagcatatagactatataatcagattgacagcatatagaatatattatcagacaagatgaggaggtacaaaagttactattgctcataatgacttacaggctaaaattagtttt

SEQ ID NO: 1748 - DNA, 237 bp, Homo sapiens
  misc_feature 9, 12, 15, 25, 172, 225: n = A,T,C or G
ctgaaggantgnaantagactggtngagagaggaaggcactgagccacatgaaggtatgtacgtaggttttgttcagtggaaatagactggtagagagaggaaggcactgaaccacatgaaggtatgtgtgtaggttttgttcagtggaaatagactggtagagagaggaangcattgaatcacatgaaggtacgtgtgtaggttttgttcactgacttcttcantgtctcagccag

SEQ ID NO: 1749 - DNA, 244 bp, Homo sapiens
  misc_feature 87: n = A,T,C or G
aaaaggccccattatctgacaaaatagatggtgaacatgcactatcccaggatatctattattatccaaagaagtgtttctcaaagngtggtccatggtactggtccatgaattggttgctaccagtcaatgaagagataaattacttgcatcagagtgtaaatcaatacattgctttagctattaataaaattttgctaaaaaatcaaatcctgtcattgacctaaaaagtatctctagattt

SEQ ID NO: 1750 - DNA, 289 bp, Homo sapiens
  misc_feature 247: n = A,T,C or G
aggccagcctccaccacgcacggcgaaaggagtgaactagctgggacacacacacgtgtgaatgcatgcaagcattcactgcatcttctccgtggactccctaccgctcttccatagccccccctttcagcctcactgtttctcgtgtgagcctatctgcttgggcagtccactcgggagggggtcatggagccaggactccctctaaataggaatggaaaggaccctgcagatatttttatcctanttgtgaaaacaaggtgcctctgattctctatatccatcacag

SEQ ID NO: 1751 - DNA, 594 bp, Homo sapiens
  misc_feature 558: n = A,T,C or G
ctggttattaatcacaagtcctggaaatggtctaatgaccgtgaatttgataaactcggcagagtctaagatccttctcatggagctgatttccaggtagctgggggctttgaaggacacccccgggggcatgccatcaaccaccacacagccagggttaattgtgattttcctgtagggaactttcacaggaaaacccataccaatagcttcaccaaatttccgactaaagaggtcattcacttgttctcttagctgtctagctttttcaactttcgagagtctttcattatcatcatctggaattgtcacctgaatgatgttaaggtcttcaacacctgatgcagtagtattaacattgggtgatgaatttatttttctgggagggctcttagaggaggtgctctccttaatcgccgtctcaaacatttcgggctttttaatgatgaacttaattttggctttgtttctgagtatcttctccagcctcggaatgccaaaagtcgatggtcttcggaatggcacaccctcaggtaagccttccacataaaagtcttncgggaaagactcaaataacgcgaacggcaccttcac

SEQ ID NO: 1752 - DNA, 311 bp, Homo sapiens
ctgaaggtttcatggctcccaaggcttggaccgtgctgacagaatactacaaatccttggagaaagcttaggctgttaacccagtcactccacctttgacacattactagtaacaagaggggaccacatagtctctgttggcatttctttgtggtgtctgtctggacatgcttcctaaaaacagaccattttccttaacttgcatcagttttggtctgccttatgagttctgttttgaacaagtgtaacacactgatggttttaatgtatcttttccacttattatagttatattcctacaatacaatttt

SEQ ID NO: 1753 - DNA, 587 bp, Homo sapiens
  misc_feature 552, 561: n = A,T,C or G
ctgtccattatacaccgtcacgttgatccctgcctccagcaactcgtccacaatgctaatgactggcttcatgaagtcctcctccatgttcacaaagacgttggtagcctggcctccccaggattgatcctcaggaataattttgagcttctttctgatggggccattcatgagctggcttaaggcatctcgttgtaggtgtctcacgtggcgctgacaaagacaaactaggtggctctgtgtgaattctagactcgactccattgtagacgtgggagtgcttttagttaagatgttatagaagttcaccccatctgtgttctgttcaatgatcatttctgctttcccccacagctctgtggcctctctgtagagccccttatttacggcattcagtacttgctctgcaaccttagacacctctgccagacctttgtcttcgagaagagacatgctgtacaggtaaggtccccaggagagcaccgaatcaacaggggagatccaggaatcacccaaggcaacccccgcaaagttgcacttgatggtccctcnctgaatggncttataaagctctagaccaatgccag

SEQ ID NO: 1754 - DNA, 564 bp, Homo sapiens
  misc_feature 409: n = A,T,C or G
cctctctccttggcttgcaggtggcaccttctcactatgtcctcacatggccttttctctgtggagagggacagagagcatgagcaggctctggtgtctcctcttcttataaagacactaatatcaccatattagggcttaaacctatgacctcatttaaccttaaccccttaaaggtcccatctccaaaaacagtcacatagcaggctactgcttcaacatatgcatttgggggaggggacaccattcagttcttaacagggtggtcaccgcaaacatggaaagtcagagccttctccccttcagaattcccgcccccacccagggatggggaagaggagcagagaggtatgggaagcagacacggagagtggcaggtaccatgctggggtggctcaggagtgcttcngaggacatatggaactggcagggctcagtgcagggaggcggaggccctgggagagccgtgtcctgagaagggcctgggctacaaccctgggcaagttacttcacctctgagcctccgatgctctgtgaaatggaaggaatgtgcttgcctgtcag

SEQ ID NO: 1755 - DNA, 214 bp, Homo sapiens
aaatgtgatgttttgagcatcaaaaagctactatctaaaaggattagtctcccagtgttcttggtaaatggggaaggttaggaaggaggcaatgatccaatgaatatagaagaactggccgattcacaggaaacttgctttggataaggtgagtcaatgggtgatattgtgcaggcagggagggaaatttctttgtacaaattcatgtccctgg

SEQ ID NO: 1756 - DNA, 225 bp, Homo sapiens
  misc_feature 8, 9, 40, 41, 76, 88, 89, 91, 100, 143, 181, 188, 197, 201,202, 217: n = A,T,C or G
aaaattannacatacatggtcaggcagcttctgtccatanntaaactattccttttcagtctgagtaatatgcggnttgttcttaatnncncacattaanaatttatttagattggtgaaactatctttataaaaaaaaaatncgaacatgaatgcaaacttaccaaacagagcccactanattgatnaagttaatnccannatagtttgccatganctgggtgg

SEQ ID NO: 1757 - DNA, 282 bp, Homo sapiens
ttgcagcctgcgatgacacagcgaatctatgacaagtttatagctcagttgcagacatctatccgggaggaaatctctgacatcaaagaggaggggaacctagaagctgtcttgaatgccttggataaaattgtggaagaaggcaaagtccgcaaagagccagcctggcgccccagcgggatcccagagaaggatctgcacagtgttatggcaccctacttcctgcagcaacgggacaccctgcggcgccatgtgcagaaacaggaggccgagaaccagcag

SEQ ID NO: 1758 - DNA, 473 bp, Homo sapiens
ctgaaacagcttttcaagctctctctcctcgtcaaggatcatgagaggcactccactcaaggggaggtgcgcaatctggtgctcttcaggcaggtcaaaactctcaaagtctagaggattgaagggaaagaatttttctatttctggataggcatcatctgaggcaggaacagagctttttgctttaacagtcttctcagtcatctttttggcagaaaagcttggctgtttttgtttgaggggtcccttggtctttacagacttttctgtagctctgttgacagttcccaaagcctttctagtagctttaggtaaggctggtggggcatcgaacgttttgccaaaacgtggtgttgaaacttgagatctcccatctaaggctttgattgaaggtccagaccccagcttcagcccatccttagcaaccacacgggtgcctggttctccattttccttatcgacatagatcagag

SEQ ID NO: 1759 - DNA, 187 bp, Homo sapiens
aaacttcgccatgatcgtgtcttctgcactcatgatatggaaaggcttgatcgtgctcacaggcagtgagagccccatcgtggtggtgctgagtggcagtatggagccggcctttcacagaggagacctcctgttcctcacaaatttccgggaagacccaatcagagctggtgaaatagttgttttt

SEQ ID NO: 1760 - DNA, 564 bp, Homo sapiens
cctctctccttggcttgcaggtggcaccttctcactatgtcctcacacggccttttctctgtggagagggacagagagcatgagcaggctctggtgtctcctcttcttataaagacactaatatcaccatattagggcttaaacctatgacctcatttaaccttaaccccttaaaggtcccatctccaaaaacagtcacatagcaggctactgcttcaacatatgcatttgggggaggggacaccattcagttcttaacagggtggtcaccgcaaacatggaaagtcagagccttctccccttcagaattcccgcccccacccagggatggggaagaggagcagagaggtatgggaagcagacacggagagtggcaggtaccatgctggggtggctcaggagtgcttcggaggacatatggaactggcagggctcagtgcagggaggcggaggccctgggagagccgtgtcctgagaagggcctgggctacaaccctgggcaagttacttcacctctgagcctccgatgctctgtgaaatggaaggaatgtgcttgcctgtcag

SEQ ID NO: 1761 - DNA, 413 bp, Homo sapiens
ctgtcttctcatctatcttagcataggagtcctctgctgccttttcaataccgtcgtggtatttctccaaagcagttttcaagtttagaaatatttcctgggacttcagtttctccctttcagcagcatcttttagttgttgaattccaagtttaattttttggatttcttgattaattgtggttactcgttcatagacagcacctcttttttcttgaactttattgcaatcctcaattactgtgcgtttgtattgcttaacatcttcatgcttcttatttattttgaattgtgctgtggcaagtttttccttcttcacaatcatcagtcttttgaacgaattttcttcagtcttcaatttcttcagttctgactcatcactctcaatttggtcctccaagttcaggcttctg

SEQ ID NO: 1762 - DNA, 315 bp, Homo sapiens
ggaaaagaaagagctgaaaatgcagaaagccgaagagttagaacttttggatacaggagaagaaacagcggctccactacagacccagccccaggttcaatgtcctccgaagaatgaagtctttccctggtgatggtcccctgccctgtctttccagcatccactctcccttgtcctcctgggggcatatctcagtcaggcagcggcttcctgatgatggtcgttggggtggttgtcatgtgatgggtcccctccaggttactaaagggtgcatgtcccctgcttgaacactgaagggcaggtggtgggccatgg

SEQ ID NO: 1763 - DNA, 114 bp, Homo sapiens
  misc_feature 16: n = A,T,C or G
cgaccgcctaagagtngcgctgtaagaagcaacaacctctcctcttcgtctccgccatcagctcggcagtcgcgaagcagcaaccatgcgtgagtgcatctccatccacgttgg

SEQ ID NO: 1764 - DNA, 114 bp, Homo sapiens
  misc_feature 25, 33, 38, 53, 62, 71, 81, 83, 93, 102: n = A,T,C or G
ctaatacgactcactatacggctcnagcggccntccgngccgggggctgctcnggttagatngacatgaanaccctacagntnccactgtggnaattgaaantatccctcatgt

SEQ ID NO: 1765 - DNA, 485 bp, Homo sapiens
aaacagtaacaaaacagaaagcaagaatcactgaacactgggtgcagtcagttctaagtccttataataattgccaaaattatttgaatgattcttcaagattaggctgatccctggctaaggtctgtgtaaggcagacaagcgttattgatcatatcaagttccctacaatatcctgtcctcaaaaccggaagcaatgaacatgatcctcttcggttggataaatgaacttcctgtttggcctgcttctaggccctgccagattctcataacatcatatacgtaagtatagttcctcaaagtgactgacatttattttaattttgctttgtttttttttattttctcccccattcctttattttgtgttattcctgactcacttgacactctctgatgcctgagagattcctgtttgggatttaatatccagggctgtgtttacagtaaaaaaagcaggcagtcccttttagtttttccttttt

SEQ ID NO: 1766 - DNA, 389 bp, Homo sapiens
aaaaacaaagtcttcaacttgggtgttgagattggcaaaaggggaagcaagggaaaagccaaggaaagataaaatattcagaagaaagtcaaagttatctgcaattacatgttagaacagattttgcaggttaaaaagatgttgcttaaatatattcataaacctgttgtaagattttcacttatgcagtttcagaaaatttagctgcttaacatatgacagaactgtattttaacaaatgacattaaaagtcaggagagctactcagttaattgataaagtagaggcaacgtgggggagccctccccacgtttattgaagatttgtggctcccccagccccgtttgcctgcatcaggctaacaacctcattcctcccatagagcctgg

SEQ ID NO: 1767 - DNA, 176 bp, Homo sapiens
  misc_feature 16, 20, 21, 35, 119, 125, 133, 142, 165, 169, 176: n = A,T,C or G
tttttcaacgattaanaatnntcattacataactnggtgaaactgaaaaagtatatcatatgggtacacaaggctatttgccagcgtatattaatattttagaaaatattccttttgtnatactnaatatcancatagagcnagaatcatattatcatacttatnatantgttcan

SEQ ID NO: 1768 - DNA, 384 bp, Homo sapiens
aaaagaaatcatggtacttcttagagcaatttgcaaaaggggaaaaaagtcttaggctcactccttggaaataaatatcaagtaaccataaaaatattcagccatttttcagttattcggggagttcaggcatggtcccacgcagagcatcagagttcctctttgaaataacccagctttgccaatgacatctcttttctcaactgcataacctcccaaaacatctgatcaacatcctgctgtttcacaagtccctgctgaatgtatcgaatgtatgtaaaaaagttacatacagaagtgatcctgtatctgcaaaaaggagaaatacaataatagttgcttgagtcccctaatttaattctgtgtttacaggacttactctgg

SEQ ID NO: 1769 - DNA, 111 bp, Homo sapiens
  misc_feature 91: n = A,T,C or G
aaatataaaaaattaaaagttaaaactctagcccttcagtgaaggagacgtaaaatggcgtgggtaacaacaactaccaaaaaaaaaaaanaaaaaaaaaaaaaaaaaaaa

SEQ ID NO: 1770 - DNA, 225 bp, Homo sapiens
ctggctgaaggggccgtggagctcccgccagcccacgattagctgggccttcttcgggccaatgcgctgaagactgcggagatctcgggctgagccttcgttcagcagatccagtattttttggcgcccatgagccagtagctccgggctgatctgtagctcccagcagtcctcagccttctcctcaggctctagggcatccagggactccagctttctcttccg

SEQ ID NO: 1771 - DNA, 223 bp, Homo sapiens
  misc_feature 39: n = A,T,C or G
ggccaagtaaaagctttatttttttaaatgaaaactacnaaaggcggggtgggttgtggcgggggcaagttgtggccctgtaggaccttcggtgactgatgatctaagtttccggaggtttctcagagcctctctggttctttcaatcggggatgtctgagggaccttccgcggcatctatgcgggcatggttactgcctctggtgccccccgcagccgcgcg

SEQ ID NO: 1772 - DNA, 419 bp, Homo sapiens
ccaagtctacaatgtcccaatatcaaggacaaccaccctagcttcttagtgaagacaatgtacagttatccattagatcaagactacacggtctatgagcaataatgtgatttctggacattgcccatgtataatcctcactgatgatttcaagctaaagcaaaccaccttatacagagatctagaatctctttatgttctccagaggaaggtggaagaaaccatgggcaggagtaggaattgagtgataaacaattgggctaatgaagaaaacttctcttattgttcagttcatccagattataacttcaatgggacactttagaccattagacaattgacactggattaaacaaattcacataatgccaaatacacaatgtatttatagcaacgtataatttgcaaagatggacttt

SEQ ID NO: 1773 - DNA, 172 bp, Homo sapiens
  misc_feature 3, 42, 66, 68, 77, 85, 104, 140: n = A,T,C or G
cgngcggctgcggggggcaccagaggcagtataccatgcccncatagatgccgcggaaggtccctnanacatccccnattgaaanaaccattagaggctctganaaacctacggaaacttagatcatcaggtcaccgaanagtcctacagggccacaacatgccccctgcac

SEQ ID NO: 1774 - DNA, 525 bp, Homo sapiens
ccttcactctcccctgaggctgtcctggcccggactgtggggagcacctccaccccccggagcaggtgcacacccaggtaagcaggtccaggggctggggtgggcagggctagcttttggatcctgagtgtcactactctctcctcccagggatgccctggacctaagtgacatcaactcagagcctcctcggggctccttcccctcctttgagcctcggaacctcctcagcctgtttgaggacaccctagacccaacctgagccccagactctgcctctgcacttttaaccttttatcctgtgtctctcccgtcgcccttgaaagctggggcccctcgggaactcccatggtcttctctgcctggccgtgtctaataaaaagtatttgaaccttgggagcacccaagcttgctcatgtggcaacatggcccttcctggtccctttattgatgtcatccagggtcttaacgcccctgaggctgagccctgctgcagaacccacgctcctggccttgggccagcag

SEQ ID NO: 1775 - DNA, 458 bp, Homo sapiens
aaattttctagtcaaattaataagcctttgtattatatgccatcctcctttggaatgatagcggtataattaaaatagaacatttttaacacagaatacttattggtgaagtggtctcttatgtagtcttcttttgacgagaacgttgagattttcgaactttcagaactttctttttttgatgttttttcccattcttttgctttttcttttggctgacctgtttctcccactttttaatcagttccttcacatctgctgaatctgggtttagacatgtttgaactccattcttcagtgtagcaatgatttcaattttctcgcaggaagggcttggggcaaattgtttaaggtctttcaaggattgtaggtggatagtcccttggttggtgctgatgcaggaacagcgaccctttctcactactggggttccttgcactccaatcagaaccagcaag

SEQ ID NO: 1776 - DNA, 461 bp, Homo sapiens
aaagtttcacttccctagcaaaatatcttcagtcaagaaattagtctttgaaaattatgaaaattgttgtgggaaatatttatacaaattattactgataatgcacatatattttgaaacattgtttctagaagcaataaaatataacctatttaggagataacccaaatgatttgtaaaaaaattaacttgtagaaaagggaaggatgttgtgtaaaatcaagtcaattatttgaggtttttataatattgagtacttatgtactaagtcacacccagccagtcaataactgagaaatcaaaataaaataataatttcaaagaattacataaatacagggccttttgagatttttggcaattgtaaacaaaaacgaatggtttttacaattcagtgtaattctacgaatatttatttggcacccatgttaggcactgaggctacacagcagtgaaatagg

SEQ ID NO: 1777 - DNA, 368 bp, Homo sapiens
ccaagttctgctggaggagcactcaagtgtgacgagcagggccactggaccctgcagggctgtggtgtatatagtgcagctttggaggtggaactctattttcacacttttctatggagccttccgagtcccaggttttcacttgaggctgtctgtctggatggcggttttcagacctccattaacatccctacccagcattctgtacttcgggggccttctctcttgttataaaactttttaccaagtgaaacatcgataccacctttgtttccattctcactggtgtaaatactgagtactaactgagaattttgactttgcattctgtcggaatacttgtgttcaataaaaattgaaagaaaaaa

SEQ ID NO: 1778 - DNA, 554 bp, Homo sapiens
  misc_feature 211, 416, 499, 518: n = A,T,C or G
cagttatgcgaaaacatggctgcggccggtttggcccttctttgtaggagagtttcatccgccctgaaatcttcccgatcgttaataactcctcaggtccctgcctgcacagggttttttcttagtttgttgcctaagagtacaccaaatgtgacatcctttcaccaatatagattacttcataccacattgtcaaggaaaggactagaanaattttttgatgacccaaaaaactgggggcaagaaaaagtaaaatctggagcagcatggacctgtcagcaactaaggaacaaaagtaatgaagatttacacaaactttggtatgtcttactgaaagaaagaaacatgcttctaaccctagagcaggaggccaagcggcagagattgccaatgccaagtccagagcggttagatanggtagtagattccatggatgcattagataaagtggtccagggaaagagaagatgccctaaggcttcttcagactggtcaaganagagctagacctggtgctntggagaaagaagacatctttggaaagaatcatctgg

SEQ ID NO: 1779 - DNA, 379 bp, Homo sapiens
  misc_feature 42, 378: n = A,T,C or G
gtcttggctgggcatgacaaccgcgtcagctgcctgggcgtnactgacgatggcatggctgtggcgacagggtcctgggatagcttcctcaagatctggaactaacgccagtagcatgtggatgccatggagactggaagaccattccaacttggacgcgttaccatgagagcatatcctatccaaccgtactaacgtggacaccctacacctcccctcagaacttcaaaagggcaagatcttttttccttcacttattgctgagaccaagagcacaattcccattgagagaaagatctctgtgctgtaaactaaaacaaattgtgcattccttccggggccatcgtctttgtcttcttttttgtcttgaatgaattnt

SEQ ID NO: 1780 - DNA, 222 bp, Homo sapiens
ctggtaattgcagaatccactttgcctgtgtaagtgaaaaatatagactgttatcttgttggccctatgaaattctgcacttttcattatatactctaccttcattaattacttctggcaagatgttctgccttagcactcagttgcattcttttcctttttcttcctgttcattatgctttaattctgaggaccatatgagggtagaatatattatctttt

SEQ ID NO: 1781 - DNA, 292 bp, Homo sapiens
ctgctggagcaagccctgcggaagcacaacgtggctgagccgtgttccatcaaagtccttgacaaggctacggtaccaataataaagctcacagatcaggagactgaagtgaaagttgacatcagctttaacatggagacgggcgtccgggcagcggagttcatcaagaattacatgaagaaatattcattgctgccttacttgattttagtattgaaacagttccttctgcagagggacctgaatgaagtttttacaggtggaattagctcatacagcctaattttaatgg

SEQ ID NO: 1782 - DNA, 381 bp, Homo sapiens
  misc_feature 132: n = A,T,C or G
aaaacctggacctttctggaagggcagcatataaaaacatcagtcccgaggaggggacaacaatactacctcactactacatctgtgatgactggttgttcaaacacaatggagtgtgtaaggtatatgttntataattcataaccatagcctcgatcatcaagaaatactttcgaaatttcattttccttcagaatatcttaagagtgctaaatttttaactgcctttttgtcgagtcaaactgtgggattctgatttgtattaaaattgtaagctcctcactggtatactatcatcctggaggggtgttgtatggctgagcaagagagagagagaatgagagagagactgtgtgtgtgtgtgtgtgtgtgtgtgtgcac

SEQ ID NO: 1783 - DNA, 127 bp, Homo sapiens
aaatatctatgtcacagcaaacaggtggcaattcaacatccagggtcgacagaatgcttgaaggagactgcaacagattggattcccatggtggagagggcatcttcacaggtgaaggggggcccag

SEQ ID NO: 1784 - DNA, 259 bp, Homo sapiens
agcccaatgttcctgttggtatagactatgtgatacctaaaacagggttttactgtaagctgtgttcactcttttatacaaatgaagaagttgcaaagaatactcattgcagcagccttcctcattatcagaaattaaagaaatttctgaataaattggcagaagaacgcagacagaagaaggaaacttaagatgtgcaaggagatttaatgatttcaaagaaaataatggttctttgtttttaatgttaacctttttt

SEQ ID NO: 1785 - DNA, 400 bp, Homo sapiens
ctggtacttgacagagaggatggcgctgtcgaccatagtctcccagaggaagcagataaagcggaaggctccccgtggctttctaaagcgagtcttcaagcgaaagaagcctcaacttcgtctggagaaaagtggtgacttattggtccatctgaactgtttactgtttgttcatcgattagcagaagagtccaggacaaacgcttgtgcgagtaaatgtagagtcattaacaaggagcatgtactggccgcagcaaaggtaattctaaagaagagcagaggttagaagtcaaagaacatattcttgaaagttatgatgcattcttttgggtggtaacagatcataaagacattttttacacatcagttaatatgggattattaaatattggctataaaa

SEQ ID NO: 1786 - DNA, 372 bp, Homo sapiens
  misc_feature 239: n = A,T,C or G
aaatgttctcatcagtttcttgccatgttgttaactatacaacctggctaaagatgaatatttttctactggtattttaatttttgacctaaatgtttaagcattcggaatgagaaaactatacagatttgagaaatgatgctaaatttatagttttcagtaacttaaaaagctaacatgagagcatgccaaaatttgctaagtcttacaaagatcaagggctgtccgcaacagggaanaacagttttgaaaatttatgaactatcttatttttaggtaggttttgaaagctttttgtctaagtgaattcttatgccttggtcagagtaataactgaaggagttgcttatcttggctttcgagtctgagttt

SEQ ID NO: 1787 - DNA, 86 bp, Homo sapiens
  misc_feature 22: n = A,T,C or G
atgatgattactttcacatcgnaatccaacctgaagagtactttgttctccaatgttgctgtcaacattcagccatttatccttat

SEQ ID NO: 1788 - DNA, 354 bp, Homo sapiens
ccttgaaaatccgcctgcaagcctaccacactcaaaccaccccactcatagagtactacaggaaacgggggatccactccgccatcgatgcatcccagacccccgatgtcgtgttcgcaagcatcctagcagccttctccaaagccacatcctagtatcagaaggccaggcgagactgcaacactgctcatcaccccgcggcgtgatccctgctcttaggtgctgggcagaggggaagggtggtcagggtgaggatggtgagggagggctggtgaggggctcagaggaatacttggaacaacagcagtgttattgtagtgtggcagtttcttttatacataggtgagagttttt

SEQ ID NO: 1789 - DNA, 651 bp, Homo sapiens
taaagggcttcttgcttttttgaatacaaaacatgatctattgtaataaaaaggtaagacattgattttacaaaattatatttccaaatacagataaaaaaatcttgaacagttaattcagattttattgatctaaaatgtgcaaaatatctgataatacttaagtttattaaattcattgtacataggctgatatcatcccatacaaaaaaatgctcagtatcttgttaagattcaaaatagtgtttaattatctgagcttaagatttattgaactactatccaaataacaacaaaagtccatattgtaaaagaaaaaagtaaaactaaaaattttctgattattaattgacttgaaattcattcccattaaaacataaaactatagccaatatccatttgaaaagtgaagaaaaactggaagtccccatgataaatacaccaattccaaataaaaaattaaaatcaaattttgctattcaaaacacacatgatcttttaagttattcaggtttaatagatttactaaggatagagttcatagagcatgtatttggtacttctgtttagactcaggttttgcaaagtccccaagagaaggtgagaaggtaaaataaacataaaattgggatccttctctcccaccacacc

SEQ ID NO: 1790 - DNA, 388 bp, Homo sapiens
aaatcatgtttaacacagtgtacacaagtcagtccaacagttagtgttaattactaataatatatgaaaaccctgccaacacaattgctgctacatcaccaatataattattaaccactgtcggaaaaacacacataaattcaggtaagactaaaagctgtctcacaaaaagaaaaaagaaatccaatggatccactaatgctatcaaaagggacatgcaggaatgtaacatgacatttttagaaatgtgtgtttctaaaaagaaaaaaaaatacactaaaatgccagtggactataattcattcaaaacatctttagtgttccttcccaaagatcttgatctgctcagtaattgcttcacaagatctatcacagccatcttttggag

SEQ ID NO: 1791 - DNA, 2442 bp, Homo sapiens
cgggagcttgaaggacacaagaatgggaggaaaggcggactctcaggaacttcattcttcacgtggtttatggtgattgcattgctgggcgtctggacatctgtagctgtcgtttggtttgatcttgttgactatgaggaagttctaggaaaactaggaatctatgatgctgatggtgatggagattttgatgtggatgatgccaaagttttattaggacttaaagagagatctacttcagagccagcagtcccgccagaagaggctgagccacacactgagcccgaggagcaggttcctgtggaggcagaaccccagaatatcgaagatgaagcaaaagaacaaattcagtcccttctccatgaaatggtacacgcagaacatgttgagggagaagacttgcaacaagaagatggacccacaggagaaccacaacaagaggatgatgagtttcttatggcgactgatgtagatgatagatttgagaccctggaacttgaagtatctcatgaagaaaccgagcatagttaccacgtggaagagacagtttcacaagactgtaatcaggatatggaagagatgatgtctgagcaggaaaatccagattccagtgaaccagtagtagaagatgaaagattgcaccatgatacagatgatgtaacataccaagtctatgaggaacaagcagtatatgaacctctagaaaatgaagggatagaaatcacagaagtaactgtcccccctgaggataatcctgtagaagattcacaggtaattgtagaagaagtaagcatttttcctgtggaagaacagcaggaagtaccaccagatacttaaagcttcaaaaagactgcccctaccaccacaggaggaccagcctaaccatacgctccaaaagatggctgtgatagatcttgtgaagcaattactgagcagatcaagatctttgggaaggaacactaaagatgttttgaatgaattatagtccactggcattttagtgtatttttttttctttttagaaacacacatttctaaaaatgtcatgttacattcctgcatgtcccttttgatagcattagtggatccattggatttcttttttctttttgtgagacagcttttagtcttacctgaatttatgtgtgtttttccgacagtggttaataattatattggtgatgtagcagcaattgtgttggcagggttttcatatattattagtaattaacactaactgttggactgacttgtgtacactgtgttaaacatgatttaaaagctattaagagtactttgtgttagcactcttaaaaacgctaacagagatcatcattagctgtgaagatttgagttgtatatacctgcactgatattcttatcaaaaatttctacattagctttaagtgttcagattaacacttttgaaacctttgtagcttttagctgattaattagaaaaattaatatttcagtgaaagttttaaattatcatttatttatttttttaaatgagaggggaaagctgaaattccttgttaagacacaaggaaaaagaatggccctactattatcatgcaaaaatgctttgttggcacctcagattaatcatataatagctatagtctcttcagcatttgtttaaattttagaaaacctgtataaattactggtgcataacttaaagattattctgcctttggctaattgagtaattcccctccagcactagagaccgctcagtgctcttactagatgaactcagtaacgccttgagctgggttgattgaggatgtgtgaaaaagctcacagagcccgatgcctgctgctatttcacggcaatgagcctttttctttctacactgaagattttcttcttatttaatgtggtttattttgggctcagaaataattgctctgttgaaaataatcctttgtcagaaaagaaggtagctaccacatcattttgaaaggaccatgagcaactataagcaaagccataagaagtggtttgatcgatatattaggggtagctcttgattttgttaacattaagataaggtgactttttccccctgcttttaggattaaaatcaaagatacttctatatttttatcactatagatcatagttattatacaatgtagtgagtcctgcatgggtactcgatgtgtaatgaaacctgaaataataataagataataagaaaagcaataattttctaaagctgtgctgtcggtgatacagagatgatactcaaattataataaaactcttcattttgtgaattatagaagctactttttataaagccatatttttttagggaaactaaggagtgacatagaactgatgaatgagtaaaagtaagttttgctggatttttgtagaactctggacgttgaggattcattatgctgtggttaactttaaatattttt

SEQ ID NO: 1792 - DNA, 2279 bp, Homo sapiens
cccagctaatcttttatcttctcaccgaagcttagtacagcgggttgaaacaatttctctaggtgagcacccctgtgacagaggagaacaagtaactctcttcctcttcaatgattgcctagagatagcaagaaaacggcacaaggttattggcacttttaggagtcctcatggccaaacccgacccccagcttctcttaagcatattcacctaatgcctctttctcagattaagaaggtattggacataagagagacagaagattgccataatgcttttgccttgcttgtgaggccaccaacagagcaggcaaatgtgctactcagtttccagatgacatcagatgaacttccaaaagaaaactggctaaagatgctgtgtcgacatgtagctaacaccatttgtaaagcagatgctgagaatcttatttatactgctgatccagaatcctttgaagtaaatacaaaagatatggacagtacattgagtagagcatcaagagcaataaaaaagacttcaaaaaaggttacaagagcattctctttctccaaaactccaaaaagagctcttcgaagggctcttatgacatcccacggctcagtggagggaagaagtccttccagcaatgataagcatgtaatgagtcgtctttctagcacatcatcattagcaattacccattctgtttccacaagcaatgtaattggatttactaagcatgtttatgttcagcgcctaaactctactggtgggcgctctcagtactcctggtttcaatctgtacgtcattctgctttccgagctagtttttcagagatactagaaggaaatactgatttttcaaatttcaaaaaagttctttccaagtcatctttgacatttgtgaagaattaggagatttgccaaccactaatggaaacaagcctcatgaagtttaatggtatcccttctccctcccttgtcagccttccttccttctttgaaaggagaagtcatacgttaagtagatctacaactcatttgatatgaagcgttaccaaaatcttaaattatagaaatgtatagacacctcatactcaaataagaaactgacttaaatggtacttgtaattagcacttggtgaaagctggaaggaagataaataacactaaactatgctatttgatttttcttcttgaaagagtaaggtttacctgttacattttcaagttaattcatgtaaaaaatgatagtgattttgatgtaatttatctcttgtttgaatctgtcattcaaaggccaataatttaagttgctatcagctgatattagtagctttgcaaccctgatagagtaaataaattttatgggcgggtgccaaatactgctgtgaatctatttgtatagtatccatgaatgaatttatggaaatagatatttgtgcagctcaatttatgcagagattaaatgacatcataatactggatgaaaacttgcatagaattctgattaaatagtgggtctgtttcacatgtgcagtttgaagtatttaaataaccactcctttcacagtttattttcttctcaagcgttttcaagatctagcatgtggattttaaaagatttgccctcattaacaagaataacatttaaaggagattgtttcaaaatatttttgcaaattgagataaggacagaaagattgagaaacattgtatattttgcaaaaacaagatgtttgtagctgtttcagagagagtacggtatatttatggtaattttatccactagcaaatcttgatttagtttgatagtgtgtggaattttattttgaaggataagaccatgggaaaattgtggtaaagactgtttgtacccttcatgaaataattctgaagttgccatcagttttactaatcttctgtgaaatgcatagatatgcgcatgttcaactttttattgtggtcttataattaaatgtaaaattgaaaattcatttgctgtttcaaagtgtgatatctttcacaatagcctttttatagtcagtaattcagaataatcaagttcatatggataaatgcatttttatttcctatttctttagggagtgctacaaatgtttgtcacttaaatttcaagtttctgttttaatagttaactgactatagattgttttctatgccatgtatgtgccacttctgagagtagtaaatgactctttgctacattttaaaagcaattgtattagtaagaactttgtaaataaatacctaaaacccaagtgttaaaaaaaaaaaa

SEQ ID NO: 1793 - DNA, 1904 bp, Homo sapiens
gggaatttgaattggaatttacttccagctgcactcatgcaagaatttgtgatgtatactaaaaaataaaaaaaggctcattcaggagagccttgtactcagcaagagtggctaacattagagcatacagactatgtgattgtataaggcatggagagttaaacaacctccagtcagctgcctgtttgaataccactgacttgttaagaatgatcttgcttttagattttaccatattcaaacttattaggtgagccttatatagcatatatacctggctgctattgtggggtttgggaacatgaggggtggggtgaactgttgttgttttaggtttcagtcagacagacatccctgtgcctcagttcccagaagcacagcaggcctctaggagcatccgtgggaacggcgcagtcctgacatcaccaactctcctgctcaggctcatcccatatacagaggtcaaagggtggggtttgatatcgggggaaggaatgagaaagtagaagcaatgtcacttcagtgccactgttgactagtctttggtgcttatgtcagtatttgttttatttcctgatttttttaaagttggcaaaactacatatttttatcttgatgaaggcagtgggagggtggaacaaaaacaagccattactgctatttctagttcatttactggagactgtcccttaatagctaatgtagaataaatttgaaacatagacctagatgacaaaaagaatgggaatagaaatgaatctcaggatttgaacaaacagaagacgtttatgctgtgttgatgcccagttctacaactgctattacatttgtcattctgtctccccttttcccctaattcttttatgtatgtatgtatacagtttgaggaaatgtgcatctatggtcagtcctttttaaaagacttaatgaatttattactcttttgcaaaaaatatacccactgcttatatgggcatacaaatgctaccctattttaaatgtaggtggcgtatgtgttcgtgttttaatgtattcagagccattgggcaataagcagtccagaacattgaaaactcaagcaggtaaagcacctaacacccttagtttctagaattactttaaaaaacttttatattgctgcatcttccacagttctttgggtagtctctgaacttaaaatttgtaggagttgtagactacctaaatttttaagttatggtatttgttcataggttgtaggggtaggtaaagaaggaaacagacaagaaaatggcttcttgaggtggcagctgctgagtggctaaatcttaccactttctttctactttttttggaaattttcccagcttagcatgaacatggatcatacagtgtttgattttatgtgattgagatttttgttttttatttttggagggaaggtcttggagaaacattaaaaagttggtgtatgtgcaaaaatacgaaatgttaaacaaaggaattttttcttatttaatctgaatggtaagcaagaactttttctatatacccttctgctgcagcagacaactaaactggtaggtggcagcagaggaaggaattcttcagattgatggctactgacttaaagtctgcataggagaagagatagagcatgacataccaagtgaagcaagggggacaaaaatggaaacaggactaagattcctgcattttgactctaaatggttcttttgaagtaaccagtgatcttttttgcttaccctcatcaacagaatggatgaagatagatttgactgtgtgctttttcaagtggagaatatgaatatacagaacaagaaagcaataactccaacctgtttgattccgtctgttttctaaataaagacactatgcgctggaaataaaaaaaaaaaaaaaaa

SEQ ID NO: 1794 - DNA, 2881 bp, Homo sapiens
acagaagtgctagaagccagtgctcgtgaactaaggagaaaaagaacagacaagggaacagcctggacatggcatcagagatccacatgacaggcccaatgtgcctcattgagaacactaatgggcgactgatggcgaatccagaagctctgaagatcctttctgccattacacagcctatggtggtggtggcaattgtgggcctctaccgcacaggcaaatcctacctgatgaacaagctggctggaaagaaaaagggcttctctctgggctccacggtgcagtctcacactaaaggaatctggatgtggtgtgtgccccaccccaagaagccaggccacatcctagttctgctggacaccgagggtctgggagatgtagagaagggtgacaaccagaatgactcctggatcttcgccctggccgtcctcctgagcagcaccttcgtgtacaatagcataggaaccatcaaccagcaggctatggaccaactgtactatgtgacagagctgacacatagaatccgatcaaaatcctcacctgatgagaatgagaatgaggttgaggattcagctgactttgtgagcttcttcccagactttgtgtggacactgagagatttctccctggacttggaagcagatggacaacccctcacaccagatgagtacctgacatactccctgaagctgaagaaaggtaccagtcaaaaagatgaaacttttaacctgcccagactctgtatccggaaattcttcccaaagaaaaaatgctttgtctttgatcggcccgttcaccgcaggaagcttgcccagctcgagaaactacaagatgaagagctggaccccgaatttgtgcaacaagtagcagacttctgttcctacatctttagtaattccaaaactaaaactctttcaggaggcatccaggtcaacgggcctcgtctagagagcctggtgctgacctacgtcaatgccatcagcagtggggatctgccgtgcatggagaacgcagtcctggccttggcccagatagagaactcagctgcagtgcaaaaggctattgcccactatgaacagcagatgggccagaaggtgcagctgcccacagaaagcctccaggagctgctggacctgcacagggacagtgagagagaggccattgaagtcttcatcaggagttccttcaaagatgtggaccatctatttcaaaaggagttagcggcccagctagaaaaaaagcgggatgacttttgtaaacagaatcaggaagcatcatcagatcgttgctcaggtttacttcaggtcattttcagtcctctagaagaagaagtgaaggcgggaatttattcgaaaccagggggctatcgtctctttgttcagaagctacaagacctgaagaaaaagtactatgaggaaccgaggaaggggatacaggctgaagagattctgcagacatacttgaaatccaaggagtctatgactgatgcaattctccagacagaccagactctcacagaaaaagaaaaggagattgaagtggaacgtgtgaaagctgagtctgcacaggcttcagcaaaaatgttgcaggaaatgcaaagaaagaatgagcagatgatggaacagaaggagaggagttatcaggaacacttgaaacaactgactgagaagatggagaacgacagggtccagttgctgaaagagcaagagaggaccctcgctcttaaacttcaggaacaggagcaactactaaaagagggatttcaaaaagaaagcagaataatgaaaaatgagatacaggatctccagacgaaaatgagacgacgaaaggcatgtaccataagctaaagaccagagccttcctgtcacccctaaccaaggcataattgaaacaattttagaatttggaacaagcgtcactacatttgataataattagatcttgcatcataacaccaaaagtttataaaggcatgtggtacaatgatcaaaatcatgttttttcttaaaaaaaaaaaaaagactgtaaattgtgcaacaaagatgcatttacctctgtatcaactcaggaaatctcataagctggtaccactcaggagaagtttattcttccagatgaccagcagtagacaaatggatactgagcagagtcttaggtaaaagtcttgggaaatatttgggcattggtctggccaagtctacaatgtcccaatatcaaggacaaccaccctagcttcttagtgaagacaatgtacagttatccattagatcaagactacacggtctatgagcaataatgtgatttctggacattgcccatgtataatcctcactgatgatttcaagctaaagcaaaccaccttatacagagatctagaatctctttatgttctccagaggaaggtggaagaaaccatgggcaggagtaggaattgagtgataaacaattgggctaatgaagaaaacttctcttattgttcagttcatccagattataacttcaatgggacactttagaccattagacaattgacactggattaaacaaattcacataatgccaaatacacaatgtatttatagcaacgtataatttgcaaagatggactttaaaagatgctgtgtaactaaactgaaataattcaattacttattatttagaatgttaaagcttatgatagtcttttctaattcttaacactcatacttgaaatctttccgagtttccccagaagagaatatgggattttttttgacatttttgacccatttaataatgctcttgtgtttacctagtatatgtagactttgtcttatgtgtcaaaagtcctaggaaagtggttgatgtttcttatagcaattaaaaattatttttgaactga

SEQ ID NO: 1795 - DNA, 422 bp, Homo sapiens
  misc_feature 295, 378, 390: n = A,T,C or G
gttttaaagcctctggacagagcagtatttcgtttaaaactttgtttttcttaaaagcttacagtgtttggctaattctcctcccctttttacaagacgggggccggagggtggacactggtggcaggttaagggatactgtcactttaagaagcctgcagattgaagtgtaaacatggagaaattaggggctgattttttaaactgtgtgagatattaaccagccgccctgttataaaatcaggaaatccaaacagcgatttacaccgattaacaccccctttatatatttttnacaaaaatacactgagaaaataatcaaacgttttcatctctcttgtctttttttgttttttaaaagtgtcaaaagtctacatntaaatataaaanattaaaagttaaactctagcccttcagtgagg

SEQ ID NO: 1796 - DNA, 797 bp, Homo sapiens
agtctctgctcttcccagcctctccggcgcgctccaagggcttcccgtcgggaccatgcgcggcagtgagctcccgctggtcctgctggcgctggtcctctgcctagcgccccgggggcgagcggtcccgctgcctgcgggcggagggaccgtgctgaccaagatgtacccgcgcggcaaccactgggcggtggggcacttaatggggaaaaagagcacaggggagtcttcttctgtttctgagagagggagcctgaagcagcagctgagagagtacatcaggtgggaagaagctgcaaggaatttgctgggtctcatagaagcaaaggagaacagaaaccaccagccacctcaacccaaggccttgggcaatcagcagccttcgtgggattcagaggatagcagcaacttcaaagatgtaggttcaaaaggcaaagttggtagactctctgctccaggttctcaacgtgaaggaaggaacccccagctgaaccagcaatgataatgatggcctctctcaaaagagaaaaacaaaacccctaagagactgagttctgcaagcatcagttctacggatcatcaacaagatttccttgtgcaaaatatttgactattctgtatctttcatccttgactaaattcgtgattttcaagcagcatcttctggtttaaacttgtttgctgtgaacaattgtcgaaaagagtcttccaattaatgcttttttatatctaggctacctgttggttagattcaaggccccgagctgttaccattcacaataaaagcttaaacacat

SEQ ID NO: 1797 - DNA, 4600 bp, Homo sapiens
aatcaactgcttcagggaaaaagaaaaaaaaaaaaaaaagacttgcctgggaggccgcgagaaacttgcattggaagcttcagcaaccagcattcgagaaactcctctctactttagcacggtctccagactcagccgagagacagcaaactgcagcgcggtgagagagcgagagagagggagagagagactctccagcctgggaactataactcctctgcgagaggcggagaactccttccccaaatcttttggggacttttctctctttacccacctccgcccctgcgaggagttgaggggccagttcggccgccgcgcgcgtcttcccgttcggcgtgtgcttggcccggggaaccgggagggcccggcgatcgcgcggcggccgccgcgagggtgtgagcgcgcgtgggcgcccgccgagccgaggccatggtgcagcaaaccaacaatgccgagaacacggaagcgctgctggccggcgagagctcggactcgggcgccggcctcgagctgggaatcgcctcctcccccacgcccggctccaccgcctccacgggcggcaaggccgacgacccgagctggtgcaagaccccgagtgggcacatcaagcgacccatgaacgccttcatggtgtggtcgcagatcgagcggcgcaagatcatggagcagtcgcccgacatgcacaacgccgagatctccaagcggctgggcaaacgctggaagctgctcaaagacagcgacaagatccctttcattcgagaggcggagcggctgcgcctcaagcacatggctgactaccccgactacaagtaccggcccaggaagaaggtgaagtccggcaacgccaactccagctcctcggccgccgcctcctccaagccgggggagaagggagacaaggtcggtggcagtggcgggggcggccatgggggcggcggcggcggcgggagcagcaacgcggggggaggaggcggcggtgcgagtggcggcggcgccaactccaaaccggcgcagaaaaagagctgcggctccaaagtggcgggcggcgcgggcggtggggttagcaaaccgcacgccaagctcatcctggcaggcggcggcggcggcgggaaagcagcggctgccgccgccgcctccttcgccgccgaacaggcgggggccgccgccctgctgcccctgggcgccgccgccgaccaccactcgctgtacaaggcgcggactcccagcgcctcggcctccgcctcctcggcagcctcggcctccgcagcgctcgcggccccgggcaagcacctggcggagaagaaggtgaagcgcgtctacctgttcggcggcctgggcacgtcgtcgtcgcccgtgggcggcgtgggcgcgggagccgaccccagcgaccccctgggcctgtacgaggaggagggcgcgggctgctcgcccgacgcgcccagcctgagcggccgcagcagcgccgcctcgtcccccgccgccggccgctcgcccgccgaccaccgcggctacgccagcctgcgcgccgcctcgcccgccccgtccagcgcgccctcgcacgcgtcctcctcggcctcgtcccactcctcctcttcctcctcctcgggctcctcgtcctccgacgacgagttcgaagacgacctgctcgacctgaaccccagctcaaactttgagagcatgtccctgggcagcttcagttcgtcgtcggcgctcgaccgggacctggattttaacttcgagcccggctccggctcgcacttcgagttcccggactactgcacgcccgaggtgagcgagatgatctcgggagactggctcgagtccagcatctccaacctggttttcacctactgaagggcgcgcaggcagggagaagggccggggggggtaggagaggagaaaaaaaaagtgaaaaaaagaaacgaaaaggacagacgaagagtttaaagagaaaagggaaaaaagaaagaaaaagtaagcagggctggcttcgcccgcgttctcgtcgtcggatcaaggagcgcggcggcgttttggacccgcgctcccatcccccaccttcccgggccggggacccactctgcccagccggagggacgcggaggaggaagagggtagacaggggcgacctgtgattgttgttattgatgttgttgttgatggcaaaaaaaaaaaagcgacttcgagtttgctcccctttgcttgaagagaccccctcccccttccaacgagcttccggacttgtctgcacccccagcaagaaggcgagttagttttctagagacttgaaggagtctcccccttcctgcatcaccaccttggttttgttttattttgcttcttggtcaagaaaggaggggagaacccagcgcacccctccccccctttttttaaacgcgtgatgaagacagaaggctccggggtgacgaatttggccgatggcagatgttttgggggaacgccgggactgagagactccacgcaggcgaattcccgtttggggcttttttttcctccctcttttccccttgccccctctgcagccggaggaggagatgttgaggggaggaggccagccagtgtgaccggcgctaggaaatgacccgagaaccccgttggaagcgcagcagcgggagctaggggcgggggcggaggaggacacgaactggaagggggttcacggtcaaactgaaatggatttgcacgttggggagctggcggcggcggctgctgggcctccgccttcttttctacgtgaaatcagtgaggtgagacttcccagaccccggaggcgtggaggagaggagactgtttgatgtggtacaggggcagtcagtggagggcgagtggtttcggaaaaaaaaaaagaaaaaaagaaaaaaaaagaaaaaaaaaagatttttttcttctcttaatcggaatcgtgatggtgttggattatttcaatggtggggttaatatagcatgttatcctgtctatcttttaaagatttctgtataagactgttgagcagtttttaaaatagtgtaggataatataaaaagcagatagatggcgctatgtttgattcctacaacgaaattatcaccagctttttttcattcttaactctttaaaggattcaaacgcaactcaaatctgtgctggactttaaaaaaacaattcaggaccaaattttttctcagtgtgtgtgtttattccttataggtgtaaatgagaagacgtgtttttttccttcaccgatgctccatcctcgtatttctttttccttgtaaatgtaatcagatgccattttatatgtggacgtatttatactggccaaacatattttttcttttgtccctttttttctttcctttctttttacttcctttatttctttattccttccttttcctttttttcttttttttttctttttttttttttttttttggtagttgttgttacccacgccattttacgtctccttcactgaagggctagagttttaacttttaattttttatatttaaatgtagacttttgacacttttaaaaaacaaaaaaagacaagagagatgaaaacgtttgattattttctcagtgtatttttgtaaaaaatatataaagggggtgttaatcggtgtaaatcgctgtttggatttcctgattttataacagggcggctggttaatatctcacacagtttaaaaaatcagcccctaatttctccatgtttacacttcaatctgcaggcttcttaaagtgacagtatcccttaacctgccaccagtgtccaccctccggcccccgtcttgtaaaaaggggaggagaattagccaaacactgtaagcttttaagaaaaacaaagttttaaacgaaatactgctctgtccagaggctttaaaactggtgcaattacagcaaaaagggattctgtagctttaacttgtaaaccacatcttttttgcactttttttataagcaaaaacgtgccgtttaaaccactggatctatctaaatgccgatttgagttcgcgacactatgtactgcgtttttcattcttgtatttgactatttaatcctttctacttgtcgctaaatataattgttttagtcttatggcatgatgatagcatatgtgttcaggtttatagctgttgtgtttaaaaattgaaaaaagtggaaaacatctttgtacatttaagtctgtattataataagcaaaaagattgtgtgtatgtatgtttaatataacatgacaggcactaggacgtctgcctttttaaggcagttccgttaagggtttttgtttttaaacttttttttgccatccatcctgtgcaatatgccgtgtagaatatttgtcttaaaattcaaggccacaaaaacaatgtttgggggaaaaaaaagaaaaaatcatgccagctaatcatgtcaagttcactgcctgtcagattgttgatatataccttctgtaaataactttttttgagaaggaaataaaatcagctggaactgaaccctaaatcttgacttttgtcgttattatgcccaatgcctaagattggaaaggccctacagtatctggacactacacaatctgccttagc

SEQ ID NO: 1798 - DNA, 1635 bp, Homo sapiens
cccgagacccggcgcaagagagcgcagccttagtaggagaggaacgcgagacgcggcagagcgcgttcagcactgacttttgctgctgcttctgcttttttttttcttagaaacaagaaggcgccagcggcagcctcacacgcgagcgccacgcgaggctcccgaagccaacccgcgaagggaggaggggagggaggaggaggcggcgtgcagggaggagaaaaagcattttcaccttttttgctcccactctaagaagtctcccggggattttgtatatattttttaacttccgtcagggctcccgcttcatatttccttttctttccctctctgttcctgcacccaagttctctctgtgtccccctcgcgggccccgcacctcgcgtcccggatcgctctgattccgcgactccttggccgccgctgcgcatggaaagctctgccaagatggagagcggcggcgccggccagcagccccagccgcagccccagcagcccttcctgccgcccgcagcctgtttctttgccacggccgcagccgcggcggccgcagccgccgcagcggcagcgcagagcgcgcagcagcagcagcagcagcagcagcagcagcagcagcagcaggcgccgcagctgagaccggcggccgacggccagccctcagggggcggtcacaagtcagcgcccaagcaagtcaagcgacagcgctcgtcttcgcccgaactgatgcgctgcaaacgccggctcaacttcagcggctttggctacagcctgccgcagcagcagccggccgccgtggcgcgccgcaacgagcgcgagcgcaaccgcgtcaagttggtcaacctgggctttgccacccttcgggagcacgtccccaacggcgcggccaacaagaagatgagtaaggtggagacactgcgctcggcggtcgagtacatccgcgcgctgcagcagctgctggacgagcatgacgcggtgagcgccgccttccaggcaggcgtcctgtcgcccaccatctcccccaactactccaacgacttgaactccatggccggctcgccggtctcatcctactcgtcggacgagggctcttacgacccgctcagccccgaggagcaggagcttctcgacttcaccaactggttctgaggggctcggcctggtcaggccctggtgcgaatggactttggaagcagggtgatcgcacaacctgcatctttagtgctttcttgtcagtggcgttgggagggggagaaaaggaaaagaaaaaaaaagaagaagaagaagaaaagagaagaagaaaaaaacgaaaacagtcaaccaaccccatcgccaactaagcgaggcatgcctgagagacatggctttcagaaaacgggaagcgctcagaacagtatctttgcactccaatcattcacggagatatgaagagcaactgggacctgagtcaatgcgcaaaatgcagcttgtgtgcaaaagcagtgggctcctggcagaagggagcagcacacgcgttatagtaactcccatcacctctaacacgcacagctgaaagttcttgctcgggtcccttcacctccccgccctttcttagagtgcagttcttagccctctagaaacgagttggtgtctttc

SEQ ID NO: 1799 - DNA, 2036 bp, Homo sapiens
tttcctctttctctaagagtctctctctccctttccctctctctccccccaatctgtctttctagcatgttgccctttttcaaccacatttgtgtttcaggtgtagagaggagagagagtgaacagggagcggggcttttgtctgttggtctccctggactgaagagagggagaatagaagcccaagactaagattctcaaaatggtttattacccagaactctttgtctgggtcagtcaagaaccatttccaaacaaggacatggagggaaggcttcctaagggaagacttcctgtcccaaaggaagtgaaccgcaagaagaacgatgagacaaacgctgcctccctgactccactgggcagcagtgaactccgctccccaagaatcagttacctccactttttttaatcgtaacacctccatttgtattacatatggtgtatgggtattgatgaggtcatggtatcatatatgggatttttttctgtgtaaatcatcaagtataagaagaaactatgggactctgagccttgctttagagaatttacagtggacaaataggtgtcatcaaaccagtttttaatcattctgactcaagtgaaaacgctcagaatttcacactgtgaatccacgtttacaacccttacaggtgggccttcaggcctggttcgctacaacaatgtcttccacaactcaaactcccaccgcgctcacacaaccggtccactcctgccttttcactcacacagctcccgactgcttcttgcagaggctgagagtccccccccccacctttttttttcatttagatgtaacaaacctagtagtttatgttcatcaattgtctgtatatctctatattttatccatgtactcttttgatgtatagaagtagtttgaaactcattgtttccttgtggtaagtgaccgagatgctgccacaggacctgagacactgatgaatggtgctattttggactttcaacatgctccttggcgaggtagctctgatggagttattttttatttccatgttctaagaaggtgttggtactctgtttccctgaatgttgttctctagactggattgacttgttttccttgtgtcttcagtgtggctttcttcctcagtgttgtaggttgagcgaatgctaccagagtgtgagagaccattgtctcgttggctggcgctcacggacatgcagtcacggtagcgggagcaatcacaaaactgtaatttacttaccaaatctcttcctttccgtagcctcgcctgcctgacttagagaaagaaaagcaataattttacaggcattttgaggtgtctctttgggttctttctgtttgaaaggatatttgtcgaaaaaaagagcaaaaccgttttaaataaactccccctggaaaaaaacccaaaacactggcatctgagtaggaatatgaaaatgacaccttttccaaatattaaattggaaaacaaggtctacaaaatcatgatacttttttaaaaggcagagcattcttttttcggcaattttgataagcaaggtgtagatttacatttttgtccttgctcccaacgaaatggataaacaaaaataaattaccatctactcatggaatgttgttgtgttagccagtctgaaagcccaccttaatttttatataactgtctttagctcttcttttgacagggcaggccttgttctgaactgtttcgcttctgactgttaaacaccgatgacgcatgcactgcacttcttcgttttcttcttgctcccccattggcctgagtttcttgtgcattactcctctccctccttcgttagaataggtatatcagctgtgtaaatagagcaagaaaacagtattctgcatctgtggcatttatgtagagttgcagttgtgtactgctgaaaatgcaggcttttgtaacagtgtgatctttactgatgcactcatgacaagtacccaatgtattttagctattttagtagtatttgttcaataaatacgcaagctgtaaggtaactgtctg

SEQ ID NO: 1800 - DNA, 2842 bp, Homo sapiens
gtgggcatccacgggcgccgagcctccgtccgtgtctctatccctcccgggcctttgtcagcgcgcccgctgggagcggggccgagagcgccggttccagtcagacagccccgcaggtcagcggccgggccgagggcgccagagggggccatgtcgtaccagggcaagaagagcatcccgcacatcacgagtgaccgactcctcatcaaaggtggacggatcatcaacgatgaccaatccctttatgctgacgtctacctggaggatggacttatcaaacaaataggagagaacttaatcgttcctggtggagtgaagaccattgaagccaacgggcggatggttattcccggaggtattgatgtcaacacgtacctgcagaagccctcccaggggatgactgcggctgatgacttcttccaagggaccagggcggcactggtgggcgggaccacgatgatcattgaccatgttgttcctgaacctgggtccagcctactgacctctttcgagaagtggcacgaagcagctgacaccaaatcctgctgtgattactccctccacgtggacatcacaagctggtacgatggcgttcgggaggagctggaggtgctggtgcaggacaaaggcgtcaattccttccaagtctacatggcctataaggatgtctaccaaatgtccgacagccagctctatgaagcctttaccttccttaagggcctgggagctgtgatcttggtccatgcagaaaatggagatttgatagctcaggaacaaaagcggatcctggagatgggcatcacgggtcccgagggccatgccctgagcagacctgaagagctggaggccgaggcggtgttccgggccatcaccattgcgggccggatcaactgccctgtgtacatcaccaaggtcatgagcaagagtgcagccgacatcatcgctctggccaggaagaaagggcccctagtttttggagagcccattgccgccagcctggggaccgatggcacccattactggagcaagaactgggccaaggctgcggcgttcgtgacttcccctcccctgagcccggaccctaccacgcccgactacttgacctccctactggcctgtggggacttgcaggtcacaggcagcggccactgtccctacagcactgcccagaaggcggtgggcaaggacaactttaccctgatccccgagggtgtcaacgggatagaggagcggatgaccgtcgtctgggacaaggcggtggctactggcaaaatggatgagaaccagtttgtcgctgtcaccagcaccaatgcagccaagatctttaacctgtacccaaggaaagggcggattgccgtgggctcggatgccgacgtggtcatctgggaccccgacaagttgaagaccataacagccaaaagtcacaagtcggcggtggagtacaacatcttcgagggtatggagtgccacggctccccactagtggtcatcagccagggcaagatcgtctttgaagacggaaacatcaacgtcaacaagggcatgggccgcttcattccgcggaaggcgttcccggagcacctgtaccagcgcgtcaaaatcaggaataaggtttttggattgcaaggggtttccaggggcatgtatgacggtcctgtgtacgaggtaccagctacacccaaatatgcaactcccgctccttcagccaaatcttcgccttctaaacaccagcccccacccatcagaaacctccaccagtccaacttcagcttatcaggtgcccagatagatgacaacaatcccaggcgcaccggccaccgcatcgtggcgccccctggtggccgctccaacatcaccagcctcggttgaacgtggatgcgcggaggagctagcctgaaggattctgggaatcatgtccatcccttttcctgtcagtgtttttgaaacccacagttttagttggtgctgatggagggagggggaagtcgaaggatgctctttcccttttctgtttaggaagaagtggtactagtgtggtgtgtttgcttggaaattccttgccccacagttgtgttcatgctgaatccacctcggagcatggtgttttcattcccccttcctagtgaaccacaggttttagcattgtcttgttctgtcccttccacttctaactccactggctccatgattctctgagtggtggttcctttgcaccctgtagatgttctaggatagttgatgcatgttactaaattacgtatgcaagtctgtgagtgcgtctgaggggacatcgccaaggactgactgagacacgatgccgagacctcaagccctgaggggcagtcccaaaacccttacagtgaagatgtttactcattgcccccacctctggtccacactagaaagaagctcgccccacctccacctgtgagatccgtgaattctcggaatggcaggggaagccttgcactaggttgcagagaagcatcctccacatcctgtgtcagaaaccctggtctccgtggcacttgtaactcaccgtgctgtcttctggtctgtgtgtgttcttcaagccagctctaggcttcaggccgagccaggttcacactcagaaagatgtctccccatccccattcggggctgacgatggggggctgatggctgcccctgcgtggcctgagtcctggtccctctgaggcagttgacggggcagtcagatttttaaagttttgtacaaagttttcctttgtaatcactcccatttttacttaacaaccaacttgttgtggctcttatttctgaattcaaagcttgtgaaaaaataaaagaaaatgaactgccc

SEQ ID NO: 1801 - DNA, 4086 bp, Homo sapiens
aaaatagcgggtactgtggtaccggaggctggcggtaccagtgtggattccaagtgatcatcacaggtacatatagtgatcttccttgtccgtctcgtcccactgggtaccaggcgaatcctactgggtaggtcgggtacgcggcatatgtggggtatgtttggtatccaggtatttgaggtacgaattcagtgtacgttgccaggtgtgcttggtcttctaaatttggaatacataggcgaggatactgattctggatagtaaaattgtttggagctcggcaatcataagaaacttgcagtttccaccccctcttcacctggagaacttgggctccattaggtgcaatcgttggagtaattagcccatcttttacatttcttgccacaaaatctcgaagagctgccatttcaggttcggacagtgaatacacatgtccactgggaatactgtgtgctccaggtatcatttctatgtgagggtcaaccaggcggtgatctgggtagacgtgctcatctactggagtgtacacattctggacatagtaatacctcactggttggtaaactctgtatccatctactggataatagagtggcggttgtggtgctggtggtgggagcgatggtggtattggagaatacatccggcagtggtagcggcagtattcagaatcaaagacgatagatcgagtgctccatgtgatattgggatcatgtgtgctcagccagcgaacccctaggacgacagggaagaatggagactgagtcacatcaaatgacagcacctctcggtgatctcccaggtcaactatcaggtcgtgagtttcgtggacaactgggcccgatgctatggggcgcccatcaattgcttccacaagtattggccagtccttgattcttagaggaattccattttgagcaacatattcgtgatcaatgaagttgccagaagcaccagaatcgatcatggctcggacgaacagggtgtgtctgcccggaagatgaatctggagcatcacttgcaagtgtggagatgaggcatcatcttgtggggaccttattatttctggcccggtcgctgaaggtccctctacagcggggccggggagtttcccgccggcgaagactttgaggccttggcaggacaattgtcagcgtagtgacctcctgttccacagtagaggcacaggttcagctttctgcgtctttctttttcttcctgcgtcaggcgcatgcgggcacctcccaccggctcggttggatctacctggtggtggcttgcaatgtgaggcaacaccagcgcccggggtggcgagcgtggcttgcgagctgcagcagccctggccagccttctctcaatgtgaatgcactgcccaatcagagcagacagcgacttggcgacctcgagcaacattaactgaggaaaaaattgaaaaaggggcgcccttgcttgggggcttcctattgtggaactgttatggaaaggagccccatccattgcttcctccttgaatggcaaatgcctttatgatccctataacttgtcccattatgtttagacccttggtggtcagaagggttctatttagggcagtgtcccctgcccctccttgtcctccaaaaattttgggaggcactgacgtggatgtcatggggtcagcacaggcatcaacatccccagagggatggaaccaagcagcctattgcccaggcattcactaacaggcagcccatcctcagcctcatagctggccggggagaagaaaggctattttgggtcccagatctttttttttttttttgagacagagtctcgctctgtcacccaggctgaagtgcaatggtgcggtctcagctcactacaacctccgcctcccgagttcaagagattctcctgcctcagcctcctgagtagctgggactacaggtgcgtaccaccaagcctggctaatttttgtgcttttagtagggacgtggtttcaccatgttgcccaggttggtctcaaactcctgggctcatgcagtccgcctacctcagcctcccaaagtgctgggattacaggcatgagccactgcacccggtctctgtttacaaatttatcaccagcttcatcccctaaggttataagctccatgagggtgggaagtctgtattgttcacctctgtatcctaagcatctagaacatagcccggcacacagtaggtgctgaagaattgaatctgttaatgtagaaaggatgtttcatctagctgaagtgtcttgtacagaataaactctcaataaatgaactgtggacacatggaagggtgagctagagctctgctcaggggttgagtgctcctcttgtgcccttgtggttgtctggttacctgaactaattggagtgcgatgcagacatagtcatggagtgagacagcagaactttgctgtcttgtttgtgagcccacatcaggggttctagactggctggttgacatggtggccccagcctgtctcttcagcagctcggcttataaaaaataaccacctcctattttggcctctttggccgaattcggccaaagaggcctagcctccgattactaaaccccttgccccacaaacgtccacattgacgagcctctttttagtaactgcttccccgtaattccttcagaggttgctgtacccttcgctgatgtgctgccctcctgtaaaacctccagatgccttcccacgtaatgcccctttcagatgctttaagctgagagcttaaaccacaggtaccatggctgacgcctgccaggtttctgctgcagataatctatgatgggaggggcatattttttacttcattacttatgtaaactcttgttccagaaagctttaatgtgtgtgggagtgttctgggtctattaggtctgtgcgcatgggtgtgggcatttgcctgtgtccaccgggtgggtctcattatgaaatgtatgtttatgtagggctttaatggctgaaaatggcaaagagatgaatagaccacttggccccatgtgtaattgccaggccccttctgtgctcaaatgaggtgtccgagtgaaggtcagcccttcccttctgtatttggggcctatttatgccaccagtaattttataagaaatctgaatagttctcccctttgagtgcatttaactctttagtatcttctctcttacctatttgagcccctctagctacagtctggcttaaatgaaaggggaattatatgcttaagaaaaagtaggacacggttgaggcagtttgctgactgaatacgcgaagaaggacctgatgggctcatatgcaccactgccatcacagtccccatcgtgatgcaagcttatatgattcttgaggtaactctaccagatacttccagatttagaaatgtgtcaaaggaaaaattggtgatactcttctttccctgccagaaacagcccagatctcctcttaagcggaaaagagattgaccttctagcagaggcaaaggtaaactcctgtaagttacttctgttaccaaagggaggggggcggcttttgtgaatgtatgaggagcttttgccagagagatattcggaggaggggtgtgcccatatgcacacatatattttcccgcataaccgtatccaatgctagcatttagaggaaggcatttagccaccaaaagtccatccatctatgctgcttccacagagaaaacattttctctttcctcctcttgaacttacataatatcctcctcccattccaaccttagaatggagtcttctgggggcagctgcaaagcgttctccctaggacagatggagcctccctttcctcatctactctgtgggtggtttcagggcccacgagtcaacatgaggagttgtgctggtggtatgtgtgttggaggctgggctggctgattcacagtgacgaggatgtcaataataacaagaatgagaatgatggtacctaataaagactttttttcccaaaaaaaaaaaaaaaaaaaaaaaaaaaaaaaaaaaaaaaaaaaaaaaaaaaaaaaaaaaaaaaaaaaaaaaaaaaaaaaaaaaaaaaaaaaaaa

SEQ ID NO: 1802 - DNA, 2512 bp, Homo sapiens
gcggggcctctaccggcccgatggagcgcgcgggcgctactagccgcgggggccaagcccctggcttcttactgcggcttcatactgagggccgagccgaggcggcgcgggtgcaggagcaggacttacggcagtgggggctgacagggattcacctacgctcttaccagctggagggagtaaactggctcgcccagcgcttccattgtcagaatggctgtatcctgggagatgagatgggcctggggaagacctgccagactattgctctcttcatttatttggcaggaagattaaatgatgaagggccatttctgattctttgtcccttgtctgttttgagcaactggaaagaagaaatgcagagatttgctccaggtctttcctgtgtaacatatgcaggcgacaaggaggaaagagcctgccttcagcaagacctgaaacaggagtcacgttttcatgtgctactgactacctatgagatttgcttgaaagatgcatcatttctaaaatcattcccttggagtgttcttgttgtggatgaagctcacaggttgaaaaaccaaagctccctgctgcataagaccttgtcagagttctcagtagtcttcagtctcctgttgaccggaactcccatccagaacagcctccaagagctctactccctcctcagttttgtggagcctgatctcttttccaaggaagaggtgggagattttattcaacgctaccaggatattgagaaagaatctgagtcagcaagtgaactgcacaaactcttgcagccatttctgctgaggcgagtgaaagctgaggtagctacagagcttcccaagaagacagaagtagtgatataccatggcatgtcagcattgcagaagaaatactacaaggccattttgatgaaagacctagatgcatttgaaaatgagacggcaaagaaggttaaactacagaacattttgtcccagcttcgaaagtgtgtggatcacccatatttgtttgatggtgtggagccggagccttttgaagttggagaccacctgactgaggctagtgggaagcttcacctgctggataagctactagcattcctgtattctgggggccatcgggttttacttttctcccaaatgacccagatgttggatattctccaagactatatggattacagaggctacagctatgagcgtgtggatggttctgtgagaggagaagagagacacttggccattaagaactttggacagcagcccattttcgtttttctcctgagtactagggcaggtggagttggcatgaacttaacagcagcagatactgtgatttttgttgacagtgactttaatcctcagaatgacttgcaagcagctgccagggctcatcgcattggccaaaacaagtctgttaaagttattcggctgattggtcgagacactgtggaagaaatagtctataggaaagcagcctccaaactgcagctcaccaacatgatcatagaaggaggccattttactctgggagcccagaaacccgctgccgatgctgacctccagttgagtgagatactcaaatttggtttggataaactgctggcctctgaggggagcaccatggatgaaatagacctggagtccatcctgggagaaacaaaagatggccagtgggtctctgatgccttgcctgcagcagaaggagggagcagagatcaagaggaaggaaaaaatcatatgtacttatttgaaggtaaagattattctaaagagcccagtaaggaagacagaaaatcatttgaacaactggtaaaccttcagaaaacccttttggagaaagctagtcaagagggccgatcactccgaaataaaggcagtgttctcatcccaggccttgtggagggatctaccaaaaggaagcgggttctgagtccagaagagctggaggacagacagaagaaaagacaagaagcagctgccaagagaaggagactcatagaggagaagaagaggcaaaaggaagaggctgaacataagaaaaaggtggcctggtgggaatccaacaattaccagtccttctgcctgccctctgaggagagcgagccagaggaccttgagaatggggaagagagctctgctgagctggattaccaagacccagatgctacttccctcaagtacgttagtggtgatgtcacccaccctcaggctggggccgaggatgctctcattgtgcactgcgtagatgactctggccactggggcagaggtggtttatttacagctctggaaaagcgatccgctgagccaagaaaaatatatgagctggctgggaaaatgaaagacctgagtttgggaggtgtccttttatttcctgttgatgataaagaatcaagaaacaaagggcaagatttgttggccttgattgtggctcagcatcgtgatcgttccaatgtcctgtctggcattaagatggcagccctagaagagggcctgaagaagatatttttagcagc

SEQ ID NO: 1803 - DNA, 1014 bp, Homo sapiens
gcagaaatagcctagggagatcaaccccgagatgctgaacaaagtgctgtcccggctgggggtcgccggccagtggcgcttcgtggacgtgctggggctggaagaggagtctctgggctcggtgccagcgcctgcctgcgcgctgctgctgctgtttcccctcacggcccagcatgagaacttcaggaaaaagcagattgaagagctgaagggacaagaagttagtcctaaagtgtacttcatgaagcagaccattgggaattcctgtggcacaatcggacttattcacgcagtggccaataatcaagacaaactgggatttgaggatggatcagttctgaaacagtttctttctgaaacagagaaaatgtcccctgaagacagagcaaaatgctttgaaaagaatgaggccatacaggcagcccatgatgccgtggcacaggaaggccaatgtcgggtagatgacaaggtgaatttccattttattctgtttaacaacgtggatggccacctctatgaacttgatggacgaatgccttttccggtgaaccatggcgccagttcagaggacaccctgctgaaggacgctgccaaggtgtgcagagaattcaccgagcgtgagcaaggagaagtccgcttctctgccgtggctctctgcaaggcagcctaatgctctgtgggagggactttgctgatttcccctcttcccttcaacatgaaaatatataccccccatgcagtctaaaatgcttcagtacttgtgaaacacagctgttcttctgttctgcagacacgccttcccctcagccacacccaggcacttaagcacaagcagagtgcacagctgtccactgggccattgtggtgtgagcttcagatggtgaagcattctccccagtgtatgtcttgtatccgatatctaacgctttaaatggctactttggtttctgtctgtaagttaagaccttggatgtggttatgttgtcctaaagaataaattttgctgatagtagc

SEQ ID NO: 1804 - DNA, 17569 bp, Homo sapiens
ggatcccttgtaaccccatgatgcatgtttatcttcgtactttttatttttgttgttgtttttttcagatggagtttaagcccagctggagtgcgatggtgcaatcccaactcactgcaacctctgcctcccaggttcaagctatttttcctggcttagcctccggagtagctggaattacagatgtgcgcccccatgaccagctaattttttctatttttagtagaaatagggtttcaccatgttagccaggctggtctcgaactcctgacctcaggtgatccgcctgcctcggctcccaaaatctcttgttatttaaagattatctctttgtctggcttttagagttggatgataacacatataggtctgagtctctttgactttatgctatatgcagttctttaagttacttgaatttgtagatttttgtctttaaccaatttgaaaaatttgaatgattttattctccaaataatttctctactaccatgggtttgcacttccccttctgggaatccaatactatcatactggttggcttgaggtgtcccataagtcccttaggacctgttcacatttctttattcttgcttcatgtccttagactcaggaatttcaagtgtgctatccctatgtgtattgattatatcttcatcctgctcaaatttgctattgaaacactctctggtgagttttcattcaggtatatttttagctccaattgttcctttcttttataatttggtaattaatacctatattgtgatttctattttcagatttctgtagttcttaatccatattttcattagcaattttagcatatttaagacagctgtttaaatgcttctctactaatgcctgtgattcttcaggaatgattctacgatatttatttctcctcataatggactgtgaatttctgttcttggtaatgcccttgtcatttatttttgagctgagtcttgctctgtcaccagaatggagtgcaagtggtgccatctcggctcactgcaacctctgcctcctggggtcaagcgattcctctgctttagcctaccgagtagctgggactacaggtgctcaccaccacgtccatctattttttttttggattttagtagagacggggtttcaccatgttggccaggatggtctccatctcctaacctcgtgatctgctcaccttggcctctgggaagtgcgtgggattacaggtgtgaaccaccgtgcctcggcctgtgtatgccttgttattttatttaactgggcatttgaaaaaataaacatcttttttactgtatatagatttgttctatgtcatgacagtcattaacttatatgtgcgcgagttctcatcaagacatcagccctacgtaaaactcaagtccttctagttgtttctgaacatgtacctatgtggactgtgttgccctttatatttccccaaataaccaatggcttttgaattgcttactattatgaaattttgcatcccagttctcctcaatagcttagatggactattgcatgtctctcccctggcctttgcctataacatctgtatgtgtatagtcaccctgaatctctactgagccactccagaaataaataagtttatttcagtcaattttaggtattttctgatgtttccatgagttatatgggaatcttagaatccaccatcttgttgaaattactctgtgaaaaaaattttcaatatctttataatattacatttatgtcaatgataacaatttacctatttttcaatttctgtttgttttatgaaaaaggaaatagaagcaatcagggcactgcaagttgtgcctactccaagatgtgaatcatggatcatgcaaattacaatcatgttttaacctgacctccaaagggagaataaagtaaaaattatcccatgtgaggattattcaccagtttatatgtcattagttaccagttttcctttatgaataatgtttagcaatattataaagtatatctaatagttatcaggttttttggctcgttactttttggtagtaacttataaaactgactggaaaagaccaataaggcactgtttgcatgttacaaattatatccaaagaccaaaagctgttaataagaaatcttccaataaaaccacatcatattttcttttttatttacacccacatcaggattacaactttatcaggactgcaccttgatcaggaaggcctgtttctcttacaaggctaataagaaaggaacaataaatttgctgatgaaaaaaagtcatgtatttaaaaattttaactttaatttttaattgagggcaatattttaaagaaatgctcattagtcattcctttaaattgtgtgtgtgagagagagaaaatgaaatagtcattcaatgctgcagatgcagaggactcatcatcatggcacaacaaaagagctgtgcactagagttctatatctatgtaagtcacaatttgttctacaaatctctttgagtaatttatgtctcatatatagagatctggaatagcaaaaatacttcagaggaaattaatgagtgtatcatgaccacataataatttacttatgaattttcttaggtaagaaacggttgaactggatgcaatttttatcacagcttgtgtaagactgcctctgtccctcctctcacatgccattggttaaccagcagacagtgtgctcaggggcgttgcagctcattgctcttatagcctgtgagggcacggaagaaacatttgctaaccaggccagtgacagaaatggattcgaaataccagtgtgtgaagctgaatgatggtcacttcatgcctgtcctgggatttggcacctatgcgcctgcagaggtaacaattaatattttagtgttgagagttcaaaggagctagagtaagtggaagctgaccaggttgtcaggcttgtgttccatgttactctgcatgactccctttaaacgtcagtctttgtctgcaatgccgtcttgtcacagggtcatctactgctattgtgcactgtttgtcttctgtatgttatttcacagcttgtcagagtctataaaactcagcagaaagaacacggcttgcctgctccctctcttgaagattgattgtaatgggagtggtttctctgtttctttgtatagtcgaacagatatttacgtcttccaagaagatacaattcagaggaatttttatggcaaaagttagtggagacaggtggatgaaatctgtgaggagagtatcactgttctgatgggcggccgtttgagccacccacactgtaatactagacctgcctaaagagaattttcccatgtactattctcacctctgggaaaattaccctgaatataaatatgtccctcattttaagaaaaaaaaaactagaaccaaacaaggaaagtttaaattctttgtctttgttaatatggggtcagatttgtataaaatattgtaacagaaaaatttcttgttctctgacaagaaaattaatggaatatattttattttctagatttagaaatagctaaatactatttctatcactggaagaaaacttgtatctcaagactgtcttgggaatacaatgtgtgtgaataggaactagttatataaaatttgagtctcacatttctcatctataagatataaggagttacaaagggacattttgaagaccattgacaggagtggtttattttgtaatataaattggcatggagaggaagtaaagatgaggataccactgaagctccggccttggtaagcctttgattgcttgcacagcgaagagaagatcaaagatggtatgaggagagggctgtgagacccggtatctagttccttgtaatttcacaggggggagcctctggaatactttcaaggtgggaagatagtttgctttgtttctgtttttgtcatttaaaagatatactgtcaaatctgtatccaaatttgttacataagtcaatcaattgtaaattttactgcaatcatatgtttcctgacagagttgccttgaatttatggagctgaacccattttgctaattcacttactcctgcagcctatttcttagatacacaaatcaatatccttagagtatacatctttacacctagtatgtggttgtgttatgcagacagaatggccaaaacctgggtagaaaagatctaacataatagactgctatccatagatgtgcctatttccaatataaacctgctggcatctgagaaagtggagttctccctgtttcctaactgataagaatggtggctctagctaactgtttgtgtaaactgtggggtttctgtgcacctgctttgcttttggagactggaagatttgtgtctgctaggcagagtgagtcaatgtatccagtcccagacaaaatcttagcaatggagtatgtagagggcatctcttgtagacaacagttcacatacattgacaaaatatgatgctggataaagtcagtgcgctctgtgcaacatggtgggagaggaatcacaggagcttacactgcattccttcataattccttccatgtggctatttccttgtgttaatttcaccatactaaaaataattaagattatgtctgttaactatagttgcgtcctgttgatttttccaaaaaatcactgaaagtgaaattattttggggacacttccaagctagtggtcaagcagtgatttttctgggactgcagaagttcctgctatgcccaacctttattactaaatgggaaagacccagtcagactgggatgggcttatgattctacatacagagctcatccaagaaaggaggaaaagctgatttttgtgaacgttgctgcttgtgcccgaactaactctcaggcacattagtcagaaaatattacgtttggttgctccccgaggttcctaaaagtaaagctctagaggccgtcaaattggcaatagaagccgggtaccaccatattgattctgcacatgtttacaataatgaggagcaggttggactggccatccgaagcaagattgcagatggcagtgtgaagagagaagacatattctacacttcaaaggtactgtgcctatgagcttgtgtgcacatgtatttattccddgtgattgtgtggaggtggcagttctatgactggatcagggtgaattgtgcttatttattacgatttattcacacttactcatgtattaaaactaatatcaaaggcaggaagtgaagatggctttctcatctttgcagtgttccaattcatgccttcaaagatgcctttactctttgagctcagcacagatcaatatggtttaacatagactatagaatgagagataatcttaatcatattatgttatctgttacctcctgggtgagtttcttacatttgttatgattttgagtttccattgtcattttgatcagagagagagagaagcgatataagagagctcagtgagtataaaagagtgatacctacattgttttaaattgcatccagcccaagttaacatattaaaaactgtgtttgcctcctcagtttccaaaccacaaagatacttagtcttgcccattgggctgaatagatgaaataattacacactaatatgagttgtaaaacttaccaaagataattcagataatgggtatgcttatgatttgataagaacttttaccttccgagtaatttcactctttcattgcaatatatgtactgaactatatatccaacatattataaagttcgtcatgatatggcagaaaaaaaggcatgacaagaagagagagaataattttgcctgtggtcattagttttgaagtagtagaaaatgtctaaatattaggtggagcaaactagtaaaattggctcaagttttgattccacaacttcctttctctaacactctgcagctttggagcaattcccatcgaccagagttggtccgaccagccttggaaaggtcactgaaaaatcttcaattggactatgctgacctctatcttattcattttccagtgtctgtaaaggtaggcagcttgtgtgatcaaattaatttcacttttgttctcagcataaatattgttttcatggagatttgaactaagctttttcttaggaggacatagggattttaacatggaagaagagccctaaacataactcctaattcctttctatggaacagaaagcaattttgaatccatacttccgtgattcgatgtctacaagaaaagagagtcgagaatcctcaaaagcctctgcctaaaaaacttgaggaaatgacaatcgatctccttgaaggctactaaggtcttatgaatgattcctgatgcacctcttgggatgttcacagacacagagtttcatgaagctgtggagtccagaaaacctgctgcacatagggtgcacaatgagtttccatttcttgcctcttttcaaggggcaagaactcagtccgggaatgtcttaaactacaaaccttcatgggaaaccttgttgcttctgcttcctctcttttcacactggaggtttgattttttcttagccatgtaattcccddgatatatgtactaactatatatcgaacatatgataaagttgatcatgatatggcagaacaaaaggcatcacaagaagagagagaataatttggcctgtggtcattagttcggaagtagtaaatgtctaaatattaggtggagcaaactagtaccddaaactggctgaagttgggattggccactggttgctctaacctctgcagctttggagcaattcccatcgaccagagttggtccgaccagccttggaaaggtcactgaaaaatcttcaattggactatgctgacctctatcttattcattttccagtgtctgtaaaggtaggcagcttgtgtgatcaaattaatttcacttttgttctcagcataaatattgttttcatggagatttgaactaagctttttcttaggaggacatagggattttaacatggaagaagagccctaaacataactcctaattcctttctatggaacagaaagcaattttgaatccatacttccgtgattgcatgtctacaagaaaagagagtgcagaatcctcaaagcctctgcctcaaaaacttgaggaaatgacaatcatctccttgaaggcacaaggtcttatttatgattcctgatttcacctcttgggatgttcacagacacagagtttcatgaagctgtggtgtcagaaaacctgctgcacatagggtgcacaatgagtttccatcttcttgcctcttttcaagggggcaagaactcagtccgggaatgtcttaaactacaaaccttcatgggaaaccttgttgcttctgcttcctctcttttcacactggacggtttcatttttgcttagccatgaattcttgtgtcattcataacttttgtcttaaggaactgaaaactagtcaggctagttaatgcaaaagggtatattagatatgactaatgggaaatcaaagccagggtacattaagaatttgataaaaactctaaaaatatatcctttctccacccttatctctgctttattacaaaaggctttttaaatatttgttccaacctttttcgttggtggcatttatggctttggagttcactgtcaggcccatgttcattaccgtgagctcctgtgcatctcctaatttccaaactagcctggaaaacgcctccattgaccatgattggttcatggtcctgtgcacggaacatcacatgttcagggagataaagaactctgatagtggcacctgggtaaaaagtacaatccattatatctggatatcaagatcttttgcagttgaagagaggtattgccacagagaaaattataggagcagaagaaagtcaatgaaagtcaatgatgacactccattaggaaccagaaagatggtatttatttacacatataataggtgtaagagattagaggaagcctgtcacctgaagacattccttataccttcatatgtagtacactttgtacataccactctctggagcgctgcatcacctacctcatggaggattagtgtccttaaatgtacctcagagcatggctatgtgtggagaaattgacttgtgacatcactaaactgactgcttctacttcagccaggtgaggaagtgatcccaaaagatgaaaatggaaaaatactatttgacacagtggatctctgtgccacatgggaggtgagtgtttggaggtgagagaacggataagaaagatgaggtaggatacatctgtttcctatcttcttagtacaagtatggaaaatgcaccattggatcaaaaacttaggaactttacaaaggtagtttttgtgagcagcgaggaaaaagaaatgacaggcatacaaaagagagaagtggtggagaagaattgggggtaaggaggactgggatttctttccttgcctgtacattaatctctccactttcctaaggaggaaacagaaattctcactcttgcaatcactatcttcttccccaatttttctgttttattttctcccttttaagaaccacggctagctagtttgattgtcacatctagacagttgttgctttcacagttctatgttacatttatcttgctcttcagtcgactacacaaatgatacctcacaattcctttttccaggccatggagaagtgtaaagatgcaggattggccaagtccatcggggtgtccaacttcaaccacaggctgctggagatgatcctcaacgagccagggctcaagtacgagcctgtctgcaaccaggtgaggcgccctcagcctcctctgcctttctgttcttcatgcccctgctttctgtcctattggccaagtatccattcatttagacccacttatctttgtaaaagagaagattctagagaacaaagcctcttcctagaagggcatggagtcctcttacttgtaccctgcttagaaaagtcttacgaaaaggtgttgtaactttgatgctgaattgtgtgttacatttataggaggtcaattcgatcaagaagtccaaggattgccaattagactcagggaaaggtggattacccctaagctatgaaagatgaccagagagtggacgggctgaaggtgatttggagggaactgtgcatagatatgaagccatgaagagatgaaatgaacagtacataaggagagagtgagagcaagagaagagaaatactagggattcacatgggcttcggatgtctcagtgcctcttggtgtctctgctttcacacttcttgaccaagggcatagatacactaaaaattatctgcagacagtgaaggtcatccatggtagaaagagaaaatgacctgtttatggagatatctgttcacagtggatgaaatccacactgaggaaggttcagcagaacatggagctgacctatgactgcgggctcctagtcggctgctttttggagtctgtcatgcaatcagctgcttaaacacatctattctatgcatggttctctcatagcctagagataattccatcttttccttgagtcctgactggtgattccaggcctccttgatcaaattgactgcccccaaatgttacacacatttcagcattaaaatcactacacctttcccagtaacttacattttttgttataattttgttataatttggtataatgatatggtctgtgataatttaataaaagcattgagaaattaatgtggtttaatactagtagttccccaatttttaatatggccattttcacactttccaaaaatttgataaaaataatactggagacccatgttaccatttatattcaaaattactaacattttgcaatgttatatggagtatatctgcataaatacatataatgtttctagaacctcttcaaggtaaattgtaaagatgacaattgacccctagagacctctcaaagcatgtcacaggaatgaagatattctcccagttccagtgtcattactgtatctaagaacatcatttatagtgcccttatgtcatttggtatccggtccatattttaatttttcattgcttaatcaaaatatcttttgtagctcttctttttttaaccagaattcaattgtttttatattgttgtatttgatatatcagttaacttgtttttcccagttgaaggttcctgtaaattaaaagttagatgtgagtattttattacattggcttaaaactttggggcaagaaaatgtttttatcatgctgtgtttttcaaattgcacgacactagactgcatacaatcacagaatgccccactagtggtgaaggtagttttaaaaacttggttaagctaacagtggtcagatctgttgtttttaactcatgttttctctttaacaattactagtaatctgctgggggataattctcaacagaagaagtcatattcccatgacaaattttcacatatgattgagtatacatcagtgatttgaacttttttctactgcatttctgttttcttctttgttatttcttatttgttatttccttggggtttttacataatcatttacaattttaaccacttgtttaactattcttacctgacatttaattaaaaataatttctcaccaagtaaaaataataaactactattcctctaagtgagagtaaaggtaaaccttcttgccttcaattagcaatgtactgtgaacgaattactgtaatgaccaccatcagagtagacaaagattgttgttctttttctcattgtcgcactaattgctacagactcacggattcttgtgtatgatttttaatttattttactcattttttaatgctcacatctactcagcatatatatatatattatatatatataatatatatgaagaagatgtggatcaaagactcatgagggcaagtgtaaaagacaaaagcacttgtttcatagggaacccactggtgacatttgagatatcaacatacaaaatccatcatacaaaaaggaaaagtaatgaaagactgtgaaaattatcagtatttatgtgtatatgtatattttctagttcatctatatagatatatatcatagatggcatatatgatatatatatgtcagatcaattagaaaacatacatatatatgtatgcatttttggtattaattaggaaactagttcttttgtttttcagacctgccctcatgagtctttgaccaaattcttgatttctggcacgatttgatgcccaaggctcaaagaatcttacctcatcccagctctgaaattggccgtgtctccttctagtggtcggagttattgagaaaccagataggttcatgagttgcttgtgctcagaaatagcatttctattttcttaggagagagggggcataaaatttatttttatgaaaaagatcatttttgaccaataatattctcagttcaaatttaatgctctacattattcagcttcttttactttggtgattttaatattaatgtaacttttggattatctgatgcttttccatcttgctcgtctgcaggtggaatgtcatccttacttcaaccagagaaaactgctggatttctgcaagtcaaaagacattgttctggttgcctatagtgctctgggatcccatcgagaagaaccatggtaataagagatacaggaagtttgccgaaaacactggtatgataaaaaagctgggagaaaaagggatcatgctgtttcctggagttcactcacagctgacttggggtgagggaagaatttgcatttctgacgagatcccaggtgatgttgaggctgctgtttgggggcctcgcttgagaagctccggtgcagagtggacgccttagtctgttagggagccgcctaacaaactgtatccccagcctcagggcctcagcctttctgcctttccttccagggtggacccgaactccccggtgctcttggaggacccagtcctttgtgccttggcaaaaaagcacaagcgaaccccagccctgattgccctgcgctaccagctgcagcgtggggttgtggtcctggccaagagctacaatgagcagcgcatcagacagaacgtgcaggtgaggagcggggctgtgggcctcaggtctcctgcacagtgtccttcacacgtgtgcttcttgtaaggctctcaggacagccttgggccagctccatttccctgtatttcctatgcatgaactctttgtgtacgtcataagggtttcttctactctagcacaggagaggcaacagaggtggagagtaataggatgggatcagaactacagatttgggttagcgttaagtcagtgatatccatatccctctgctggggccatgtccttttctttattttttataatgaagcattgattagatgttctttagtctccaactcatggcggatttttcttcttgtatgtttatgtagtataaattccttatatttattctcttagaattttatctttgcgaagtgcttgtttaactctgcctttttttttggcgaggtggttgtgtgtctttatttttatgtgtaggagaccatatttataccaataccttaggatataagacaaacccacttaatatagaggcttaatgcacaagcatttattgagctcaaggttccatggttagaaaattagcctgggctcagcctaaactcagtccattccttctattcctggctgggctctcatgtgtgttctgggcagtgaaggagctctgcttcaggatgtccctggggcatttgtgtgagtgcccccctctcccatgcagttctttatcctccagccatccagcccagggttcacctcagcacagggcatagtgaatggacatgtgcaaagcctttttaggtctaggctcagagacaccaaccattgcttctgggaaattctatcacctaatgcaagttacaggacaggtagactaaggggtggggaaacacacaccacctcttactggaaggaactgaaattcgatatagccaagcaagtggacacagggacatatgactgttagagggcatgttcctaattgaatcgtatcgattcatatgatatgtgtgaaataatatatcaatagttatatgtatgaatatgaatatatataaattgatatattatttcatatattctcaagaattcatacaagtctctaaagaattaacatccagaatacatacatatgtgtatgttttctaattaggtagatacataaaatatacatcatgtatgatatatattataaaacctatgtcatatatatgacatatatcatgtatatgtatatacgtcactatttgctaaaacattaagtaaaataagtgaagaaatcgataggatactctgaaatagtgatacagagaacgagagaataaaaaatgacaataatgaaacaattgatgaatcgaggtaatggcattccttaaattatttttaaaatatttttggacattagagaattccaaaaaaaaaatgaaaagttatgaaagaatgtggaaattataagtattaatacatatgtgtatgtctctaatcgatctagtatatataagatatatatgatatatgacatatgtgtatataatatatatgtagatactagaaccatacatatatatgtattatctgatataatcttagagacttgaatgtatcttgaaataacatctcccaaatttatctgcgttgtcatattctctgtggttatgtttttcacaaacaaaagtttctatccttcatgtagactaatttttcatgcctctttcttgtggttggtgtgtgttgtgtcttatcctatattgggaatatcacaatattttactgtgttatcttacaaaattgttaatattctttccttataaatttggttaattctaatgggtatgacttttaaaatattatgtgaaataaggatccaaatatgcgtatctaatttttgaatttttagcaaaatttaccatttattgaaaagtttatatttgctcacataacttgaatttttttacctgacacatatatgaaatgtccatgagcaattatctggcctctcttccatcttcagttaacttattcacttttctgtgctataatgttaaaaagtaagtttcacttcatatggacaatattttctacttcttcatttatttaataatatcttagttattcttgactaatgtgttatttaaaattttgaatcatcttattaacttccacaggcaagtaaatgttttagtctctcattgatcattgtaataagcctgcagatcaatgcagagagaactgaatctttgataatattgagatttccagtccatcgatcataatatgaatatcccactacttattaataaatcatctcttaataaatatatcattaattgcataaatttctccacgactgatcattttttttttgagacagagtctcgttctgtcacccagggtggagtgcagtggcacgaactcggctcactgcaacctccacctcccgggttcaagcagttctcctgcctcagcctccagagtagctgggactgctggcgcatgctgccatgcccagctaattttttgtattttagtagagacggggtttcactgtgttgcccaggctgttgcccaggctgttctctaactccgtaaatcaggcaatcctcctgcgctggcctcccaaagtgctaggattataggcgtgagccaacgtgcccggcaattactgataattttaatagtttttgacaacttttcattttcattttgtggattttctaatatatagaaatattaaaagaataatgcaacaaatcttctacctacattcatcaagtgttacattgctgtcatttttttactctctatctctcattttctgtattactccttcagtttccctatggatttatacacttatttgattgaatgtattagtttgagtgacatctttttgatatttagagtctcccaaatttacatagtgagtacccacaccttttgaatgtgaaatcgttagtatttagacaattattggcttgagtgatgttgaaaactgatttttcctattatacctgttcattggagagatagatattcaatgttattcatcaaacctactaaattatgctagacattacaaaattgcctctagattcttgtggggtcttctaggtacatggccctatcatgtgggcacaaagtaagctctgtttcttcttcagcttcctctgagatattctcttcatctgcagtgttgtgcagtttcaaaatattttatctgggaatggatttctgcttatttttgactggttttcattgaccacttgggtgtttagagaggtctttcataaattttggaaacgtatcaatcttttttaagtattgtctctgcaccctattgtctgatgaacttggttgttcccaattggcaatgatgtaatctaaaaataattaaagttccctattactgtgataggtgtttgaattccagttgacttcagaggagatgaaagccatagatggcctaaacagaaatgtgcgatatttgacccttgatatgtaagtgattttggagatggttgttctaatttatttcagaggaggaacgtaggatgggtgttgagagtgtgacctccacaccaggggcacagaggccaacgtagaacagaggtgagaacaggagctttctggaagtctcctcctggattcactccagagctctgttctctggcagggagagtggcctggggtcagcatgggtcaacctgtgcctctgctctcgtgactccaaggaactttccagagcagccaagatcattgctgaatccgcaccttccatgcaggcctgccgtttgtattactgtctagtgtacacactgtggatatggccatgtggtcgcattagatgtttccaaatctgcgcttctatcttgttcttcccaacctgctcaatgtcttaccagatgggaggcagttccgtcaatcttgtgggccaggttccaattccacctctttcacatggatgcttgctggatcctgtcaatttagcattttgaatcatttcaaaccttttacgagcctttctttgcatgttttcccatgagccaaatactgcatttgcctccagaaagtctgtcttagtggagcgaataggagcacttggccttggtgttctgcaatatggagatctcagtgtagagaatgagaagtgttaaaatcaaatgcagagtgtagatgcaaaagcaccattattggagataatttataaccagtaacgagacgttttactattcctctatattctaaggtttctaggattcatacgaaggatcattcatataatgagggaaaaaggaggtaaggtactgactgcagtaagaatttcaccaggtatataggggatgatggggattatgtgtgaaaaaaaacaagcacatggtacatcatagtacccaaaatttggtggatattattagtagtattttatccgcttagcagaaaatacaaaatgaaaaatggaaatgataataagaaaaggaaaagtggcaagcattagaaatgtttacttctgattaatgttttttatgatcatgaaatcaatcactagtgttattgggtagaactcaaatatggtctggagtaaaccacttgcgagctccaagtgtttgctctcggtgtaatcacaaaggataggctcaattccggtaattaacaagttataactgtatatgtgagcagtcatttatctgtgtctttacattttggattatgtctacctataaaatggtttatgcattgtagctctctaatattgggccctatacataaacaataatttaacgtgtctaatctaaccaagtgtgttgcgtatgataggcaggtagtaagtaatatgtaaagtaataaaataaagaacaattactaccagtataattaatgtactcaaaattgtttattagtgatgagcatatatcttccttattcctcttcaatgtaaggcagaaggagttcctgttggaagtgagaatgtgaaatagaaaaggtcagaatgtctctccattgacagatgtgggatctgttgttgagagatgtagagaaatatggtttgacatttcaccttgtgtgttttatgtggttaagttccaggcaggggaatagaattaaattattctttattttgaaaatcaagatatgataaagtcacgagttcattaaacaaagaaacacagattctagagcagtcagaaaatgaacttcttaacatctacactagcggcagcttcctagaaatcactgcgctaccggctagtaacggagtcattgccattcagagtgtgcatttttttttcctctttccagttttgctggcccccctaattatccgatttctgatgaatattaacatggagggcattgcatgaggtctgccagaaggccctgcgtgtggatggtgacacagaggatggctctatgctggtgactggacacatggcc

SEQ ID NO: 1805 - DNA, 791 bp, Homo sapiens
ctctggctggacgccgccgccgccgctgccaccgcctctgatccaagccacctcccgccagagaggtgtcatgggcttccaaaagttctcccccttcctggctctcagcatcttggtcctgttgcaggcaggcagcctccatgcagcaccattcaggtctgccctggagagcagcccagcagacccggccacgctcagtgaggacgaagcgcgcctcctgctggctgcactggtgcaggactatgtgcagatgaaggccagtgagctggagcaggagcaagagagagagggctccagcctggacagccccagatctaagcggtgcggtaatctgagtacttgcatgctgggcacatacacgcaggacttcaacaagtttcacacgttcccccaaactgcaattggggttggagcacctggaaagaaaagggatatgtccagcgacttggagagagaccatcgccctcatgttagcatgccccagaatgccaactaaactcctccctttccttcctaatttcccttcttgcatccttcctataacttgatgcatgtggtttggttcctctctggtggctctttgggctggtattggtggctttccttgtggcagaggatgtctcaaacttcagatgggaggaaagagagcaggactcacaggttggaagagaatcacctgggaaaataccagaaaatgagggccgctttgagtcccccagagatgtcatcagagctcctctgtcctgcttctgaatgtgctgatcatttgaggaataaaattatttttcccc

SEQ ID NO: 1806 - protein, 255 aa, Homo sapiens
MVIALLGVWTSVAVVWFDLVDYEEVLGKLGIYDADGDGDFDVDDAKVLLGLKERSTSEPAVPPEEAEPHTEPEEQVPVEAEPQNIEDEAKEQIQSLLHEMVHAEHVEGEDLQQEDGPTGEPQQEDDEFLMATDVDDRFETLELEVSHEETEHSYHVEETVSQDCNQDMEEMMSEQENPDSSEPVVEDERLHHDTDDVTYQVYEEQAVYEPLENEGIEITEVTVPPEDNPVEDSQVIVEEVSIFPVEEQQEVPPDT

SEQ ID NO: 1807 - protein, 226 aa, Homo sapiens
MPLSQIKKVLDIRETEDCHNAFALLVRPPTEQANVLLSFQMTSDELPKENWLKMLCRHVANTICKADAENLIYTADPESFEVNTKDMDSTLSRASRAIKKTSKKVTRAFSFSKTPKRALRRALMTSHGSVEGRSPSSNDKHVMSRLSSTSSLAITHSVSTSNVIGFTKHVYVQRLNSTGGRSQYSWFQSVRHSAFRASFSEILEGNTDFSNFKKVLSKSSLTFVKN

SEQ ID NO: 1808 - protein, 52 aa, Homo sapiens [sequence omitted]

SEQ ID NO: 1809 - protein, 592 aa, Homo sapiens
MASEIHMTGPMCLIENTNGRLMANPEALKILSAITQPMVVVAIVGLYRTGKSYLMNKLAGKKKGFSLGSTVQSHTKGIWMWCVPHPKKPGHILVLLDTEGLGDVEKGDNQNDSWIFALAVLLSSTFVYNSIGTINQQAMDQLYYVTELTHRIRSKSSPDENENEVEDSADFVSFFPDFVWTLRDFSLDLEADGQPLTPDEYLTYSLKLKKGTSQKDETFNLPRLCIRKFFPKKKCFVFDRPVHRRKLAQLEKLQDEELDPEFVQQVADFCSYIFSNSKTKTLSGGIQVNGPRLESLVLTYVNAISSGDLPCMENAVLALAQIENSAAVQKAIAHYEQQMGQKVQLPTESLQELLDLHRDSEREAIEVFIRSSFKDVDHLFQKELAAQLEKKRDDFCKQNQEASSDRCSGLLQVIFSPLEEEVKAGIYSKPGGYRLFVQKLQDLKKKYYEEPRKGIQAEEILQTYLKSKESMTDAILQTDQTLTEKEKEIEVERVKAESAQASAKMLQEMQRKNEQMMEQKERSYQEHLKQLTEKMENDRVQLLKEQERTLALKLQEQEQLLKEGFQKESRIMKNEIQDLQTKMRRRKACTIS

SEQ ID NO: 1810 - protein, 57 aa, Homo sapiens [sequence omitted]

SEQ ID NO: 1811 - protein, 148 aa, Homo sapiens
MRGSELPLVLLALVLCLAPRGRAVPLPAGGGTVLTKMYPRGNHWAVGHLMGKKSTGESSSVSERGSLKQQLREYIRWEEAARNLLGLIEAKENRNHQPPQPKALGNQQPSWDSEDSSNFKDVGSKGKVGRLSAPGSQREGRNPQLNQQ

SEQ ID NO: 1812 - protein, 474 aa, Homo sapiens
MVQQTNNAENTEALLAGESSDSGAGLELGIASSPTPGSTASTGGKADDPSWCKTPSGHIKRPMNAFMVWSQIERRKIMEQSPDMHNAEISKRLGKRWKLLKDSDKIPFIREAERLRLKHMADYPDYKYRPRKKVKSGNANSSSSAAASSKPGEKGDKVGGSGGGGHGGGGGGGSSNAGGGGGGASGGGANSKPAQKKSCGSKVAGGAGGGVSKPHAKLILAGGGGGGKAAAAAAASFAAEQAGAAALLPLGAAADHHSLYKARTPSASASASSAASASAALAAPGKHLAEKKVKRVYLFGGLGTSSSPVGGVGAGADPSDPLGLYEEEGAGCSPDAPSLSGRSSAASSPAAGRSPADHRGYASLRAASPAPSSAPSHASSSASSHSSSSSSSGSSSSDDEFEDDLLDLNPSSNFESMSLGSFSSSSALDRDLDFNFEPGSGSHFEFPDYCTPEVSEMISGDWLESSISNLVFTY

SEQ ID NO: 1813 - protein, 238 aa, Homo sapiens
MESSAKMESGGAGQQPQPQPQQPFLPPAACFFATAAAAAAAAAAAAAQSAQQQQQQQQQQQQQQAPQLRPAADGQPSGGGHKSAPKQVKRQRSSSPELMRCKRRLNFSGFGYSLPQQQPAAVARRNERERNRVKLVNLGFATLREHVPNGAANKKMSKVETLRSAVEYIRALQQLLDEHDAVSAAFQAGVLSPTISPNYSNDLNSMAGSPVSSYSSDEGSYDPLSPEEQELLDFTNWF

SEQ ID NO: 1814 - protein, 68 aa, Homo sapiens
MVYYPELFVWVSQEPFPNKDMEGRLPKGRLPVPKEVNRKKNDETNAASLTPLGSSELRSPRISYLHFF

SEQ ID NO: 1815 - protein, 572 aa, Homo sapiens
MSYQGKKSIPHITSDRLLIKGGRIINDDQSLYADVYLEDGLIKQIGENLIVPGGVKTIEANGRMVIPGGIDVNTYLQKPSQGMTAADDFFQGTRAALVGGTTMIIDHVVPEPGSSLLTSFEKWHEAADTKSCCDYSLHVDITSWYDGVREELEVLVQDKGVNSFQVYMAYKDVYQMSDSQLYEAFTFLKGLGAVILVHAENGDLIAQEQKRILEMGITGPEGHALSRPEELEAEAVFRAITIAGRINCPVYITKVMSKSAADIIALARKKGPLVFGEPIAASLGTDGTHYWSKNWAKAAAFVTSPPLSPDPTTPDYLTSLLACGDLQVTGSGHCPYSTAQKAVGKDNFTLIPEGVNGIEERMTVVWDKAVATGKMDENQFVAVTSTNAAKIFNLYPRKGRIAVGSDADVVIWDPDKLKTITAKSHKSAVEYNIFEGMECHGSPLVVISQGKIVFEDGNINVNKGMGRFIPRKAFPEHLYQRVKIRNKVFGLQGVSRGMYDGPVYEVPATPKYATPAPSAKSSPSKHQPPPIRNLHQSNFSLSGAQIDDNNPRRTGHRIVAPPGGRSNITSLG

SEQ ID NO: 1816 - protein, 325 aa, Homo sapiens
MTERRRDELSEEINNLREKVMKQSEENNNLQSQVQKLTEENTTLREQVEPTPEDEDDDIELRGAAAAAAPPPPIEEECPEDLPEKFDGNPDMLAPFMAQCQIFMEKSTRDFSVDRVRVCFVTSMMTGRAARWASAKLERSHYLMHNYPAFMMEMKHVFEDPQRREVAKRKIRRLRQGMGSVIDYSNAFQMIAQDLDWNEPALIDQYHEGLSDHIQEELSHLEVAKSLSALIGQCIHIERRLARAAAARKPRSPPRALVLPHIASHHQVDPTEPVGGARMRLTQEEKERRRKLNLCLYCGTGGHYADNCPAKASKSSPAGNSPAPL

SEQ ID NO: 1817 - protein, 357 aa, Homo sapiens
MLQIHLPGRHTLFVRAMIDSGASGNFIDHEYVAQNGIPLRIKDWPILVEAIDGRPIASGPVVHETHDLIVDLGDHREVLSFDVTQSPFFPVVLGVRWLSTHDPNITWSTRSIVFDSEYCRYHCRMYSPIPPSLPPPAPQPPLYYPVDGYRVYQPVRYYYVQNVYTPVDEHVYPDHRLVDPHIEMIPGAHSIPSGHVYSLSEPEMAALRDFVARNVKDGLITPTIAPNGAQVLQVKRGWKLQVSYDCRAPNNFTIQNQYPRLSIPNLEDQAHLATYTEFVPQIPGYQTYPTYAAYPTYPVGFAWYPVGRDGQGRSLYVPVMITWNPHWYRQPPVPQYPPPQPPPPPPPPPPPPSYSTL

SEQ ID NO: 1818 - protein, 102 aa, Homo sapiens [sequence omitted]

SEQ ID NO: 1819 - protein, 831 aa, Homo sapiens
MERAGATSRGGQAPGFLLRLHTEGRAEAARVQEQDLRQWGLTGIHLRSYQLEGVNWLAQRFHCQNGCILGDEMGLGKTCQTIALFIYLAGRLNDEGPFLILCPLSVLSNWKEEMQRFAPGLSCVTYAGDKEERACLQQDLKQESRFHVLLTTYEICLKDASFLKSFPWSVLVVDEAHRLKNQSSLLHKTLSEFSVVFSLLLTGTPIQNSLQELYSLLSFVEPDLFSKEEVGDFIQRYQDIEKESESASELHKLLQPFLLRRVKAEVATELPKKTEVVIYHGMSALQKKYYKAILMKDLDAFENETAKKVKLQNILSQLRKCVDHPYLFDGVEPEPFEVGDHLTEASGKLHLLDKLLAFLYSGGHRVLLFSQMTQMLDILQDYMDYRGYSYERVDGSVRGEERHLAIKNFGQQPIFVFLLSTRAGGVGMNLTAADTVIFVDSDFNPQNDLQAAARAHRIGQNKSVKVIRLIGRDTVEEIVYRKAASKLQLTNMIIEGGHFTLGAQKPAADADLQLSEILKFGLDKLLASEGSTMDEIDLESILGETKDGQWVSDALPAAEGGSRDQEEGKNHMYLFEGKDYSKEPSKEDRKSFEQLVNLQKTLLEKASQEGRSLRNKGSVLIPGLVEGSTKRKRVLSPEELEDRQKKRQEAAAKRRRLIEEKKRQKEEAEHKKKVAWWESNNYQSFCLPSEESEPEDLENGEESSAELDYQDPDATSLKYVSGDVTHPQAGAEDALIVHCVDDSGHWGRGGLFTALEKRSAEPRKIYELAGKMKDLSLGGVLLFPVDDKESRNKGQDLLALIVAQHRDRSNVLSGIKMAALEEGLKKIFLAA

SEQ ID NO: 1820 - protein, 212 aa, Homo sapiens
MLNKVLSRLGVAGQWRFVDVLGLEEESLGSVPAPACALLLLFPLTAQHENFRKKQIEELKGQEVSPKVYFMKQTIGNSCGTIGLIHAVANNQDKLGFEDGSVLKQFLSETEKMSPEDRAKCFEKNEAIQAAHDAVAQEGQCRVDDKVNFHFILFNNVDGHLYELDGRMPFPVNHGASSEDTLLKDAAKVCREFTEREQGEVRFSAVALCKAA

SEQ ID NO: 1821 - protein, 323 aa, Homo sapiens [sequence omitted]

SEQ ID NO: 1822 - protein, 141 aa, Homo sapiens
MGFQKFSPFLALSILVLLQAGSLHAAPFRSALESSPADPATLSEDEARLLLAALVQDYVQMKASELEQEQEREGSSLDSPRSKRCGNLSTCMLGTYTQDFNKFHTFPQTAIGVGAPGKKRDMSSDLERDHRPHVSMPQNAN

SEQ ID NO: 1823 - DNA, 6188 bp, Homo sapiens
caacaacaacaactccaagcacaccggccataagagtgcgtgtgtccccaacatgaccgaacgaagaagggacgagctctctgaagagatcaacaacttaagagagaaggtcatgaagcagtcggaggagaacaacaacctgcagagccaggtgcagaagctcacagaggagaacaccacccttcgagagcaagtggaacccacccctgaggatgaggatgatgacatcgagctccgcggtgctgcagcagctgctgccccaccccctccaatagaggaagagtgcccagaagacctcccagagaagttcgatggcaacccagacatgctggctcctttcatggcccagtgccagatcttcatggaaaagagcaccagggatttctcagttgatcgtgtccgtgtctgcttcgtgacaagcatgatgaccggccgtgctgcccgttgggcctcagcaaagctggagcgctcccactacctgatgcacaactacccagctttcatgatggaaatgaagcatgtctttgaagaccctcagaggcgagaggttgccaaacgcaagatcagacgcctgcgccaaggcatggggtctgtcatcgactactccaatgctttccagatgattgcccaggacctggattggaacgagcctgcgctgattgaccagtaccacgagggcctcagcgaccacattcaggaggagctctcccacctcgaggtcgccaagtcgctgtctgctctgattgggcagtgcattcacattgagagaaggctggccagggctgctgcagctcgcaagccacgctcgccaccccgggcgctggtgttgcctcacattgcaagccaccaccaggtagatccaaccgagccggtgggaggtgcccgcatgcgcctgacgcaggaagaaaaagaaagacgcagaaagctgaacctgtgcctctactgtggaacaggaggtcactacgctgacaattgtcctgccaaggcctcaaagtcttcgccggcgggaaactccccggccccgctgtagagggaccttcagcgaccgggccagaaataataaggtccccacaagatgatgcctcatctccacacttgcaagtgatgctccagattcatcttccgggcagacacaccctgttcgtccgagccatgatcgattctggtgcttctggcaacttcattgatcacgaatatgttgctcaaaatggaattcctctaagaatcaaggactggccaatacttgtggaagcaattgatgggcgccccatagcatcgggcccagttgtccacgaaactcacgacctgatagttgacctgggagatcaccgagaggtgctgtcatttgatgtgactcagtctccattcttccctgtcgtcctaggggttcgctggctgagcacacatgatcccaatatcacatggagcactcgatctatcgtctttgattctgaatactgccgctaccactgccggatgtattctccaataccaccatcgctcccaccaccagcaccacaaccgccactctattatccagtagatggatacagagtttaccaaccagtgaggtattactatgtccagaatgtgtacactccagtagatgagcacgtctacccagatcaccgcctggttgaccctcacatagaaatgatacctggagcacacagtattcccagtggacatgtgtattcactgtccgaacctgaaatggcagctcttcgagattttgtggcaagaaatgtaaaagatgggctaattactccaacgattgcacctaatggagcccaagttctccaggtgaagagggggtggaaactgcaagtttcttatgattgccgagctccaaacaattttactatccagaatcagtatcctcgcctatctattccaaatttagaagaccaagcacacctggcaacgtacactgaattcgtacctcaaatacctggataccaaacataccccacatatgccgcgtacccgacctacccagtaggattcgcctggtacccagtgggacgagacggacaaggaagatcactatatgtacctgtgatgatcacttggaatccacactggtaccgccagcctccggtaccacagtacccgccgccacagccgccgcctccaccaccaccaccgccgccgcctccatcttacagtaccctgtaaatacctgtcatgtccttcaggatctctgccctcaaaatttattcctgttcagcttctcaatcagtgactgtgtgctaaattttaggctactgtatcttcaggccacctgaggcacatcctctctgaaacggctatggaaggttagggccactctggactggcacacatcctaaagcaccaaaagaccttcaacattttctgagagcaacagagtatttgccaataaatgatctctcatttttccaccttgactgccaatctaactaaaataattaataagtttactttccagccagtcctggaagtctgggttttacctgccaaaacctccatcaccatctaaattataggctgccaaatttgctgtttaacatttacagagaagctgatacaaacgcaggaaatgctgatttctttatggagggggagacgaggaggaggaggacatgacttttcttgcggtttcggtaccctctttttaaatcactggaggactgaggccttattaaggaagccaaaattatcggtgcagtgtggaaaggcttccgtgatcctctcgctgcacccttagaaacttcaccgtcttcaaactccatttccatggttctgttaattctcaaggagcagcaactcgactggttctcccaggagcaggaaaaacccttgtgacatgaaacatctcaggcctgaaaagaaagtgctctctcagatggactcttgcatgttaagactatgtcttcacatcatggtgcaaatcacatgtacccaatgactccggctttgacacaacaccttaccatcatcatgccatgatggcttccacaaagcattaaacctggtaaccagagattactggtggctccagcgttgttagatgttcatgaaatgtgaccacctctcaatcacctttgagggctaaagagtagcacatcaaaaggactccaaaatcccatacccaactcttaagagatttgtcctggtacttcagaaagaattttcatgagtgttcttaattggctggaaaagcaccagctgacgttttggaagaatctatccatgtgtctgcctccatatgcatctgggcatttcatcttcagtcccctcattagactgtagcattaggatgtgtggagagaggagaaatgatttagcacccagattcacactcctatgcctggaagggggacatctttgaagaagaggaattagggctgtggacactgtcttgaggatgtggacttccttagtgagctccacattacttgatggtaaccacttcaaaaggatcagaatccacgtaatgaaaaaggtccctctagaggatggagctgatgtgaagctgccaatggatgaaaagcctcagaaagcaactcaaaggactcaaagcaacggacaacacaagagttgtcttcagcccagtgacacctctgatgtcccctggaagctttgtgctaacctgggactgcctgacttcctttagcctggtcccttgctactaccttgaactgttttatctaacctctctttttctgtttaattctttgctactgccattgaccctgctgcaggatttgtgtcattttcctgcctggttgctgagactccattttgctgccacacacagagatgtaagaggcaggctttaattgccaaagcacagtttgagcagtagaaaacaacatggtgtatatctcaaattgcctgacatgaagaggagtctaacggtgaagtttcacttttcatcagcatcatctttcacatgttcattatcatccgctcttattcttgcatgtttaaacacttaaaatttttagtataatttttagtgtgttttgaagtggtgactaggctttcaaaaacttccattgaattacaaagcactatccagttcttattgttaaactaagtaaaaatgataagtaacatagtgtaaaatattcctttactgtgaacttcttacaatgctgtgaatgagaggctcctcagaactggagcatttgtataataattcatcctgttcatcttcaattttaacatcatatataatttcaattctatcaattgggcctttaaaaatcatataaaaggatataaaatttgaaaagagaaacctaattggctatttaatccaaaacaacttttttttttccttcaatggaatcagaaagcttgtcaatcactcatgtgttttagagtaattacttttaaaatggtgcatttgtgcttctgaactattttgaagagtcacttctgtttacctcaagtatcaattcatcctccatacatttgaattcaagttgttttttgtcaaatttacagttgtcaattgatcttcaagctgcagggtgcctagaaatgggccgttgtctgtagccctggcatgtgcacacggacatttgccaccactgcaagcaaaagtctggagaagttcaccaacgacaagaacgattagggaaaatatgctgctgtgggttaacaactcagaaagtccctgatccacatttggctgtttactaaagcttgtgattaactttttggcagtgtgtactatgctctattgctatatatgctatctataaatgtagatgttaaggataagtaattctaaatttattattctatagttttgaagtttggttaagtttcctttcactcaattgatttattttgttgttaatcaaatttatgttaattggatcctttaaattttttttggcattttccaacaaaaatggctttattcataagaaaggaaaaaaatcaatggaatttgatatctaaagaagttagaaagggagcaaaataaaaaacataaaggagatagatgaattagtaagcaaatcagtagtcgagtttttcaaactggcaaaattaattaattgacttttagcccaaatttacattgttaattaaatcaagaaggaagaagatctaagagctcccattgataggcaagcctagagagaactagctaaatttatcatgctaggatattgaaacacagaaagtttacatacatttatgaagggtcaatttagtttggacagtgaggtatttgtcttagtggaaaaaaggagaattagtctgatcaaatcgtgaagtaatacagtgaacttgcaggtgcacaaaataagagggccacatctatatggtgcagtctggaattctgtttaagtttgtaggtacctcttggacttctgaattgatccagttgtcatccaccacagacatctcacatcagatacagacagttccaagattgacaacagagaacaacctgctggaaagacctgggcagaaatggagagccctgcgggaaccatgctacattttcatctaaagagagaatgcacatctgatgagactgaaagttctttgttgttttagattgtagaatggtattgaattggtctgtggaaaattgcattgcttttatttctttgtgtaatcaagtttaagtaataggggatatataatcataagcattttagggtgggagggactattaagtaattttaagtgggtggggttatttagaatgttagaataatattatgtattagatatcgctataagtggacatgcgtacttacttgtaaccctttaccctataattgctatccttaaagatttcaaataaactcggagggaactgcagggagaccaacttatttagagcgaattggacatggataaaaaccccagtgggagaaagttcaaaggtgattagattaataatttaatagaggatgagtgacctctgataaattactgctagaatgaacttgtcaatgatggatggtaaattttcatggaagttataaaagtgataaataaaaacccttgcttttacccctgtcagtagccctcctcctaccactgaaccccattgcccctacccctccttctaactttattgctgtattctcttcactctatatttctctctatttgctaatattgcattgctgttacaataaaaattcaataaagatttagtggttaagtgc

SEQ ID NO: 1824 - DNA, 866 bp, Homo sapiens
ggcagagccacaggaaggatgaggaagaccaggctctgggggctgctgtggatgctctttgtctcagaactccgagctgcaactaaattaactgaggaaaagtatgaactgaaagaggggcagaccctggatgtgaaatgtgactacacgctagagaagtttgccagcagccagaaagcttggcagataataagggacggagagatgcccaagaccctggcatgcacagagaggccttcaaagaattcccatccagtccaagtggggaggatcatactagaagactaccatgatcatggtttactgcgcgtccgaatggtcaaccttcaagtggaagattctggactgtatcagtgtgtgatctaccagcctcccaaggagcctcacatgctgttcgatcgcatccgcttggtggtgaccaagggtttttcagggacccctggctccaatgagaattctacccagaatgtgtataagattcctcctaccaccactaaggccttgtgcccactctataccagccccagaactgtgacccaagctccacccaagtcaactgccgatgtctccactcctgactctgaaatcaaccttacaaatgtgacagatatcatcagggttccggtgttcaacattgtcattctcctggctggtggattcctgagtaagagcctggtcttctctgtcctgtttgctgtcacgctgaggtcatttgtaccctaggcccacgaacccacgagaatgtcctctgacttccagccacatccatctggcagttgtgccaagggaggagggaggaggtaaaaggcagggagttaataacatgaattaaatctgtaatcaccrgctaaaaaaaaaaaaaaaaa

SEQ ID NO: 1825 - protein, 234 aa, Homo sapiens
MRKTRLWGLLWMLFVSELRAATKLTEEKYELKEGQTLDVKCDYTLEKFASSQKAWQIIRDGEMPKTLACTERPSKNSHPVQVGRIILEDYHDHGLLRVRMVNLQVEDSGLYQCVIYQPPKEPHMLFDRIRLVVTKGFSGTPGSNENSTQNVYKIPPTTTKALCPLYTSPRTVTQAPPKSTADVSTPDSEINLTNVTDIIRVPVFNIVILLAGGFLSKSLVFSVLFAVTLRSFVP

SEQ ID NO: 1826 - DNA, 192 bp, Homo sapiens
atgcggtgccacgcccatggaccttcttgtctcgtcacggccataactagggaggaaggagggccgaggagtggaggggctcaggcgaagctggggtgctgttgggggtatccgagtcccagaagcacctggaaccccgacagaagattctggactccccagacgggaccaggagagggacggcatgagcga

SEQ ID NO: 1827 - DNA, 288 bp, Homo sapiens
cacacacaaacacagaaccacacagccagtcccaggagcccagtaatggagagccccaaaaagaagaaccagcagctgaaagtcgggatcctacacctgggcagcagacagaagaagatcaggatacagctgagatcccagtgcgcgacatggaaggtgatctgcaagagctgcatcagtcaaacaccggggataaatctggatttgggttccggcgtcaaggtgaagataatacctaaagaggaacactgtaaaatgccagaagcaggtgaagagcaaccacaagtt

SEQ ID NO: 1828 - DNA, 141 bp, Homo sapiens
cacacacaaacacagaaccacacagccagtcccaggagcccagtaatggagagccccaaaaagaagaaccagcagctgaaagtcgggatcctacacctgggcagcagacagaagaagatcaggatacagctgagatcccag

SEQ ID NO: 1829 - DNA, 111 bp, Homo sapiens
gtgctgggaagggaaatgcgcgacatggaaggtgatctgcaagagctgcatcagtcaaacaccggggataaatctggatttgggttccggcgtcaaggtgaagataatacc

SEQ ID NO: 1830 - protein, 64 aa, Homo sapiens
MRCHAHGPSCLVTAITREEGGPRSGGAQAKLGCCWGYPSPRSTWNPDRRFWTPQTGPGEGRHER

SEQ ID NO: 1831 - protein, 96 aa, Homo sapiens
HTQTQNHTASPRSPVMESPKKKNQQLKVGILHLGSRQKKIRIQLRSQCATWKVICKSCISQTPGINLDLGSGVKVKIIPKEEHCKMPEAGEEQPQV

SEQ ID NO: 1832 - protein, 47 aa, Homo sapiens
HTQTQNHTASPRSPVMESPKKKNQQLKVGILHLGSRQKKIRIQLRSQ

SEQ ID NO: 1833 - protein, 37 aa, Homo sapiens
VLGREMRDMEGDLQELHQSNTGDKSGFGFRRQGEDNT

SEQ ID NO: 1834 - protein, 20 aa, Homo sapiens
MAKGDPKKPKGKTSAYAFFV

SEQ ID NO: 1835 - protein, 20 aa, Homo sapiens
PKGKTSAYAFFVQTCREEHK

SEQ ID NO: 1836 - protein, 20 aa, Homo sapiens
AFFVQTCREEHKKKNPEVPV

SEQ ID NO: 1837 - protein, 20 aa, Homo sapiens
EEHKKKNPEVPVNFAEFSKK

SEQ ID NO: 1838 - protein, 20 aa, Homo sapiens
EVPVNFAEFSKKCSERWKTV

SEQ ID NO: 1839 - protein, 20 aa, Homo sapiens
FSKKCSERWKTVSGKEKSKF

SEQ ID NO: 1840 - protein, 20 aa, Homo sapiens
WKTVSGKEKSKFDEMAKADK

SEQ ID NO: 1841 - protein, 20 aa, Homo sapiens
KSKFDEMAKADKVRYDREMK

SEQ ID NO: 1842 - protein, 20 aa, Homo sapiens
KADKVRYDREMKDYGPAKGG

SEQ ID NO: 1843 - protein, 20 aa, Homo sapiens
REMKDYGPAKGGKKKKDPNA

SEQ ID NO: 1844 - protein, 20 aa, Homo sapiens
AKGGKKKKDPNAPKRPPSGF

SEQ ID NO: 1845 - protein, 20 aa, Homo sapiens
DPNAPKRPPSGFFLFCSEFR

SEQ ID NO: 1846 - protein, 20 aa, Homo sapiens
PSGFFLFCSEFRPKIKSTNP

SEQ ID NO: 1847 - protein, 20 aa, Homo sapiens
SEFRPKIKSTNPGISIGDVA

SEQ ID NO: 1848 - protein, 20 aa, Homo sapiens
STNPGISIGDVAKKLGEMWN

SEQ ID NO: 1849 - protein, 20 aa, Homo sapiens
GDVAKKLGEMWNNLNDSEKQ

SEQ ID NO: 1850 - protein, 20 aa, Homo sapiens
EMWNNLNDSEKQPYITKAAK

SEQ ID NO: 1851 - protein, 20 aa, Homo sapiens
SEKQPYITKAAKLKEKYEKD

SEQ ID NO: 1852 - protein, 20 aa, Homo sapiens
KAAKLKEKYEKDVADYKSKG

SEQ ID NO: 1853 - protein, 20 aa, Homo sapiens
YEKDVADYKSKGKFDGAKGP

SEQ ID NO: 1854 - protein, 20 aa, Homo sapiens
KSKGKFDGAKGPAKVARKKV

SEQ ID NO: 1855 - protein, 20 aa, Homo sapiens
AKGPAKVARKKVEEEDEEEE

SEQ ID NO: 1856 - protein, 20 aa, Homo sapiens
RKKVEEEDEEQEEEEEEEEE

SEQ ID NO: 1857 - DNA, 28 bp, Artificial Sequence
  PCR primer
agtgcgaattcgggctgcgtgcaggagg

SEQ ID NO: 1858 - DNA, 32 bp, Artificial Sequence
  PCR primer
ggactcgagctactgcaagtctggtgtggatg

SEQ ID NO: 1859 - DNA, 33 bp, Artificial Sequence
  PCR primer
agatgaattcacgcgtccgcgccgcgcggcgca

SEQ ID NO: 1860 - DNA, 31 bp, Artificial Sequence
  PCR primer
agttctcgagtcacctccctgggcccctttg

SEQ ID NO: 1861 - DNA, 945 bp, Homo sapiens
atgcatcaccatcaccatcacacggccgcgtccgataacttccagctgtcccagggtgggcagggattcgccattccgatcgggcaggcgatggcgatcgcgggccagatcaagcttcccaccgttcatatcgggcctaccgccttcctcggcttgggtgttgtcgacaacaacggcaacggcgcacgagtccaacgcgtggtcgggagcgctccggcggcaagtctcggcatctccaccggcgacgtgatcaccgcggtcgacggcgctccgatcaactcggccaccgcgatggcggacgcgcttaacgggcatcatcccggtgacgtcatctcggtgacctggcaaaccaagtcgggcggcacgcgtacagggaacgtgacattggccgagggacccccggccgaattcacgcgtccgcgccgcgcggcgcaggggaggcgagaggcgccccccggtggagagcctgagccccgcgcaagtctggcggcacctggcgagcggagccggagtcgggctggggaccgcggggttgaggccggaccgcggcggggtcgggggagaaacgcgcgctgccctggcacgggccccaaccccccggccgcgcggaatggtatggcccggccggagttaaggccggggggaggcggcgagtcccgcggcggcggcgacgatggggctgcgtgcaggaggaacgctgggcagggccggcgcgggtcggggggcgcccgaggggcccgggccgagcggcggcgcgcagggcggcagcatccactcgggccgcatcgccgcggtgcacaacgtgccgctgagcgtgctcatccggccgctgccgtccgtgttggaccccgccaaggtgcagagcctcgtggacacgatccgggaggacccagacagcgtgccccccatcgatgtcctctggatcaaaggggcccagggaggtga

SEQ ID NO: 1862 - DNA, 822 bp, Homo sapiens
atgcatcaccatcaccatcacacggccgcgtccgataacttccagctgtcccagggtgggcagggattcgccattccgatcgggcaggcgatggcgatcgcgggccagatcaagcttcccaccgttcatatcgggcctaccgccttcctcggcttgggtgttgtcgacaacaacggcaacggcgcacgagtccaacgcgtggtcgggagcgctccggcggcaagtctcggcatctccaccggcgacgtgatcaccgcggtcgacggcgctccgatcaactcggccaccgcgatggcggacgcgcttaacgggcatcatcccggtgacgtcatctcggtgacctggcaaaccaagtcgggcggcacgcgtacagggaacgtgacattggccgagggacccccggccgaattcgggctgcgtgcaggaggaacgctgggcagggccggcgcgggtcggggggcgcccgaggggcccgggccgagcggcggcgcgcagggcggcagcatccactcgggccgcatcgccgcggtgcacaacgtgccgctgagcgtgctcatccggccgctgccgtccgtgttggaccccgccaaggtgcagagcctcgtggacacgatccgggaggacccagacagcgtgccccccatcgatgtcctctggatcaaaggggcccagggaggtgactacttctactcctttgggggctgccaccgctacgcggcctaccagcaactgcagcgagagaccatccccgccaagcttgtccagtccactctctcagacctaagggtgtacctgggagcatccacaccagacttgcagtag

SEQ ID NO: 1863 - protein, 314 aa, Homo sapiens [sequence omitted]

SEQ ID NO: 1864 - protein, 273 aa, Homo sapiens
MHHHHHHTAASDNFQLSQGGQGFAIPIGQAMAIAGQIKLPTVHIGPTAFLGLGVVDNNGNGARVQRVVGSAPAASLGISTGDVITAVDGAPINSATAMADALNGHHPGDVISVTWQTKSGGTRTGNVTLAEGPPAEFGLRAGGTLGRAGAGRGAPEGPGPSGGAQGGSIHSGRIAAVHNVPLSVLIRPLPSVLDPAKVQSLVDTIREDPDSVPPIDVLWIKGAQGGDYFYSFGGCHRYAAYQQLQRETIPAKLVQSTLSDLRVYLGASTPDLQ

SEQ ID NO: 1865 - DNA, 790 bp, Homo sapiens
ctgattccgcgactccttggccgccgctgcgcatggaaagctctgccaagatggagagcggcggcgccggccagcagccccagccgcagccccagcagcccttcctgccgcccgcagcctgtttctttgccacggccgcagccgcggcggccgcagccgccgcagcggcagcgcagagcgcgcagcagcagcagcagcagcagcagcagcagcagcaggcgccgcagctgagaccggcggccgacggccagccctcagggggcggtcacaagtcagcgcccaagcaagtcaagcgacagcgctcgtcttcgcccgaactgatgcgctgcaaacgccggctcaacttcagcggctttggctacagcctgccgcagcagcagccggccgccgtggcgcgccgcaacgagcgcgagcgcaaccgcgtcaagttggtcaacctgggctttgccacccttcgggagcacgtccccaacggcgcggccaacaagaagatgagtaaggtggagacactgcgctcggcggtcgagtacatccgcgcgctgcagcagctgctggacgagcatgacgcggtgagcgccgccttccaggcaggcgtcctgtcgcccaccatctcccccaactactccaacgacttgaactccatggccggctcgccggtctcatcctactcgtcggacgagggctcttacgacccgctcagccccgaggagcaggagcttctcgacttcaccaactggttctgaggggctcggcctggtcaggccctggtgcgaatggactttggaagcag

SEQ ID NO: 1866 - DNA, 784 bp, Homo sapiens
ccgcgactccttggccgccgctgcgcatggaaagctctgccaagatggagagcggcggcgccggccagcagccccagccgcagccccagcagcccttcctgccgcccgcagcctgtttctttgccacggccgcagccgcggcggccgcagccgccgcagcggcagcgcagagcgcgcagcagcagcagcagcagcagcagcagcagcagcaggcgccgcagctgagaccggcggccgacggccagccctcagggggcggtcacaagtcagcgcccaagcaagtcaagcgacagcgctcgtcttcgcccgaactgatgcgctgcaaacgccggctcaacttcagcggctttggctacagcctgccgcagcagcagccggccgccgtggcgcgccgcaacgagcgcgagcgcaaccgcgtcaagttggtcaacctgggctttgccacccttcgggagcacgtccccaacggcgcggccaacaagaagatgagtaaggtggagacactgcgctcggcggtcgagtacatccgcgcgctgcagcagctgctggacgagcatgacgcggtgagcgccgccttccaggcaggcgtcctgtcgcccaccatctcccccaactactccaacgacttgaactccatggccggctcgccggtctcatcctactcgtcggacgagggctcttacgacccgctcagccccgaggagcaggagcttctcgacttcaccaactggttctgaggggctcggcctggtcaggccctggtgcgaatggactttggaagcag

SEQ ID NO: 1867 - DNA, 789 bp, Homo sapiens
ttccgcgactccttggccgccgctgcgcatggaaagctctgccaagatggagagcggcggcgccggccagcagccccagccgcagccccagcagcccttcctgccgcccgcagcctgtttctttgccacggccgcagccgcggcggccgcagccgccgcagcggcagcgcagagcgcgcagcagcagcagcagcagcagcagcagcagcagcagcaggcgccgcagctgagaccggcggccgacggccagccctcagggggcggtcacaagtcagcgcccaagcaagtcaagcgacagcgctcgtcttcgcccgaactgatgcgctgcaaacgccggctcaacttcagcggctttggctacagcctgccgcagcagcagccggccgccgtggcgcgccgcaacgagcgcgagcgcaaccgcgtcaagttggtcaacctgggctttgccacccttcgggagcacgtccccaacggcgcggccaacaagaagatgagtaaggtggagacactgcgctcggcggtcgagtacatccgcgcgctgcagcagctgctggacgagcatgacgcggtgagcgccgccttccaggcaggcgtcctgtcgcccaccatctcccccaactactccaacgacttgaactccatggccggctcgccggtctcatcctactcgtcggacgagggctcttacgacccgctcagccccgaggagcaggagcttctcgacttcaccaactggttctgaggggctcggcctggtcaggccctggtgcgaatggactttggaagcag

SEQ ID NO: 1868 - DNA, 785 bp, Homo sapiens
tctgattccgcgactccttggccgccgctgcgcatggaaagctctgccaagatggagagcggcggcgccggccagcagccccagccgcagccccagcagcccttcctgccgcccgcagcctgtttctttgccacggccgcagccgcggcggccgcagccgccgcagcggcagcgcagagcgcgcagcagcagcagcagcagcagcagcagcaggcgccgcagctgagaccggcggccgacggccagccctcagggggcggtcacaagtcagcgcccaagcaagtcaagcgacagcgctcgtcttcgcccgaactgatgcgctgcaaacgccggctcaacttcagcggctttggctacagcctgccgcagcagcagccggccgccgtggcgcgccgcaacgagcgcgagcgcaaccgcgtcaagttggtcaacctgggctttgccacccttcgggagcacgtccccaacggcgcggccaacaagaagatgagtaaggtggagacactgcgctcggcggtcgagtacatccgcgcgctgcagcagctgctggacgagcatgacgcggtgagcgccgccttccaggcaggcgtcctgtcgcccaccatctcccccaactactccaacgacttgaactccatggccggctcgccggtctcatcctactcgtcggacgagggctcttacgacccgctcagccccgaggagcaggagcttctcgacttcaccaactggttctgaggggctcggcctggtcaggccctggtgcgaatggactttggaagcag

SEQ ID NO: 1869 - protein, 236 aa, Homo sapiens
MESSAKMESGGAGQQPQPQPQQPFLPPAACFFATAAAAAAAAAAAAAQSAQQQQQQQQQQQQAPQLRPAADGQPSGGGHKSAPKQVKRQRSSSPELMRCKRRLNFSGFGYSLPQQQPAAVARRNERERNRVKLVNLGFATLREHVPNGAANKKMSKVETLRSAVEYIRALQQLLDEHDAVSAAFQAGVLSPTISPNYSNDLNSMAGSPVSSYSSDEGSYDPLSPEEQELLDFTNWF

SEQ ID NO: 1870 - protein, 236 aa, Homo sapiens; identical to SEQ ID NO: 1869

SEQ ID NO: 1871 - protein, 237 aa, Homo sapiens [sequence omitted]

SEQ ID NO: 1872 - protein, 234 aa, Homo sapiens
MESSAKMESGGAGQQPQPQPQQPFLPPAACFFATAAAAAAAAAAAAAQSAQQQQQQQQQQAPQLRPAADGQPSGGGHKSAPKQVKRQRSSSPELMRCKRRLNFSGFGYSLPQQQPAAVARRNERERNRVKLVNLGFATLREHVPNGAANKKMSKVETLRSAVEYIRALQQLLDEHDAVSAAFQAGVLSPTISPNYSNDLNSMAGSPVSSYSSDEGSYDPLSPEEQELLDFTNWF

SEQ ID NO: 1873 - DNA, 1353 bp, Homo sapiens
gcagcatgtaacctggcctgcatccaggaaatagaggacttcggatccttctaaccctaccacccaactggccccagtacattcattctctcaggaaaaaaaacaaggtccccacagcaaagaaaaggaataggatcaagagatacgtggctgctggcagagcaagcatgaattcgatgacttcagcagttccggtggccaattctgtgttggtggtggcaccccacaatggttatcctgtgaccccaggaattatgtctcacgtgcccctgtatccaaacagccagccgcaagtccacctagttcctgggaacccacctagtttggtgtcgaatgtgaatgggcagcctgtgcagaaagctctgaaagaaggcaaaaccttgggggccatccagatcatcattggcctggctcacatcggcctcggctccatcatggcgacggttctcgtaggggaatacctgtctatttcattctacggaggctttcccttctggggaggcttgtggtttatcatttcagaatctctctccgtggcagcagaaaatcagccatattcttattgcctgctgtctggcagtttgggcttgaacatcgtcagtgcaatctgctctgcagttggagtcatactcttcatcacagatctaagtattccccacccatatgcctaccccgactattatccttacgcctggggtgtgaaccctggaatggcgatttctggcgtgctgctggtcttctgcctcctggagtttggcatcgcatgcgcatcttcccactttggctgccagttggtctgctgtcaatcaagcaatgtgagtgtcatctatccaaacatctatgcagcaaacccagtgatcaccccagaaccggtgacctcaccaccaagttattccagtgagatccaagcaaataagtaaggctacagattctggaagcatctttcactgggaccaaaagaagtcctcctccctttctgggcttccataacccaggtcgttcctgttctgacagctgaggaaacgtctctcccactgtttgtactctcaccttcattcttcaattcagtctaggaaaccatgctgtttctctatcaagaagaagacagagattttaaacagatgttaaccaagagggactccctagggcacatgcatcagcacatatgtgggcatccagcctctggggccttggcacacacacattcgtgtgctctgctgcatgtgagcttgtgggttaaaggaacaaatatttagacattcaatcttcactctttcaattgtgcattcatttaataaatagatactgagcattcaaaaaaaaaaaaaaaaaaaaaaaaaaaaaaaaaaaaaa

SEQ ID NO: 1874 - protein, 250 aa, Homo sapiens
MNSMTSAVPVANSVLVVAPHNGYPVTPGIMSHVPLYPNSQPQVHLVPGNPPSLVSNVNGQPVQKALKEGKTLGAIQIIIGLAHIGLGSIMATVLVGEYLSISFYGGFPFWGGLWFIISESLSVAAENQPYSYCLLSGSLGLNIVSAICSAVGVILFITDLSIPHPYAYPDYYPYAWGVNPGMAISGVLLVFCLLEFGIACASSHFGCQLVCCQSSNVSVIYPNIYAANPVITPEPVTSPPSYSSEIQANK

SEQ ID NO: 1875 - DNA, 1155 bp, Homo sapiens
atgcatcaccatcaccatcacacggccgcgtccgataacttccagctgtcccagggtgggcagggattcgccattccgatcgggcaggcgatggcgatcgcgggccagatcaagcttcccaccgttcatatcgggcctaccgccttcctcggcttgggtgttgtcgacaacaacggcaacggcgcacgagtccaacgcgtggtcgggagcgctccggcggcaagtctcggcatctccaccggcgacgtgatcaccgcggtcgacggcgctccgatcaactcggccaccgcgatggcggacgcgcttaacgggcatcatcccggtgacgtcatctcggtgacctggcaaaccaagtcgggcggcacgcgtacagggaacgtgacattggccgagggacccccggccgaattcatgacttcagcagttccggtggccaattctgtgttggtggtggcaccccacaatggttatcctgtgaccccaggaattatgtctcacgtgcccctgtatccaaacagccagccgcaagtccacctagttcctgggaacccacctagtttggtgtcgaatgtgaatgggcagcctgtgcagaaagctctgaaagaaggcaaaaccttgggggccatccagatcatcattggcctggctcacatcggcctcggctccatcatggcgacggttctcgtaggggaatacctgtctatttcattctacggaggctttcccttctggggaggcttgtggtttatcatttcagaatctctctccgtggcagcagaaaatcagccatattcttattgcctgctgtctggcagtttgggcttgaacatcgtcagtgcaatctgctctgcagttggagtcatactcttcatcacagatctaagtattccccacccatatgcctaccccgactattatccttacgcctggggtgtgaaccctggaatggcgatttctggcgtgctgctggtcttctgcctcctggagtttggcatcgcatgcgcatcttcccactttggctgccagttggtctgctgtcaatcaagcaatgtgagtgtcatctatccaaacatctatgcagcaaacccagtgatcaccccagaaccggtgacctcaccaccaagttattccagtgagatccaagcaaataagtaa

SEQ ID NO: 1876 - protein, 384 aa, Homo sapiens [sequence omitted]

SEQ ID NO: 1877 - DNA, 861 bp, Homo sapiens
atgcatcaccatcaccatcacacggccgcgtccgataacttccagctgtcccagggtgggcagggattcgccattccgatcgggcaggcgatggcgatcgcgggccagatcaagcttatgacttcagcagttccggtggccaattctgtgttggtggtggcaccccacaatggttatcctgtgaccccaggaattatgtctcacgtgcccctgtatccaaacagccagccgcaagtccacctagttcctgggaacccacctagtttggtgtcgaatgtgaatgggcagcctgtgcagaaagctctgaaagaaggcaaaaccttgggggccatccagatcatcattggcctggctcacatcggcctcggctccatcatggcgacggttctcgtaggggaatacctgtctatttcattctacggaggctttcccttctggggaggcttgtggtttatcatttcagaatctctctccgtggcagcagaaaatcagccatattcttattgcctgctgtctggcagtttgggcttgaacatcgtcagtgcaatctgctctgcagttggagtcatactcttcatcacagatctaagtattccccacccatatgcctaccccgactattatccttacgcctggggtgtgaaccctggaatggcgatttctggcgtgctgctggtcttctgcctcctggagtttggcatcgcatgcgcatcttcccactttggctgccagttggtctgctgtcaatcaagcaatgtgagtgtcatctatccaaacatctatgcagcaaacccagtgatcaccccagaaccggtgacctcaccaccaagttattccagtgagatccaagcaaataagtaa

SEQ ID NO: 1878 - protein, 286 aa, Homo sapiens
MHHHHHHTAASDNFQLSQGGQGFAIPIGQAMAIAGQIKLMTSAVPVANSVLVVAPHNGYPVTPGIMSHVPLYPNSQPQVHLVPGNPPSLVSNVNGQPVQKALKEGKTLGAIQIIIGLAHIGLGSIMATVLVGEYLSISFYGGFPFWGGLWFIISESLSVAAENQPYSYCLLSGSLGLNIVSAICSAVGVILFITDLSIPHPYAYPDYYPYAWGVNPGMAISGVLLVFCLLEFGIACASSHFGCQLVCCQSSNVSVIYPNIYAANPVITPEPVTSPPSYSSEIQANK

SEQ ID NO: 1879 - DNA, 186 bp, Homo sapiens
atgcatcaccatcaccatcacacggccgcgtccgataacttccagctgtcccagggtgggcagggattcgccattccgatcgggcaggcgatggcgatcgcgggccagatcaagcttctaagtattccccacccatatgcctaccccgactattatccttacgcctggggtgtgaaccctggaatg

SEQ ID NO: 1880 - protein, 62 aa, Homo sapiens
MHHHHHHTAASDNFQLSQGGQGFAIPIGQAMAIAGQIKLLSIPHPYAYPDYYPYAWGVNPGM

SEQ ID NO: 1881 - DNA, 69 bp, Homo sapiens
ctaagtattccccacccatatgcctaccccgactattatccttacgcctggggtgtgaaccctggaatg

SEQ ID NO: 1882 - protein, 23 aa, Homo sapiens
LSIPHPYAYPDYYPYAWGVNPGM

SEQ ID NO: 1883 - DNA, 6799 bp, Homo sapiens
gccacgtaagaagtgtctttcgcctcccgccatgattctgaggcctccccagccatgtgcaactgcgtgtttactgctctgggcccagtgcctccctcgctcaatggagtgacggcatccaactcacaagacaggagactcaacagaatgaccaagtggagaagacgtctaagttctcagcggtctcagccgaatgactgaagaggaaccagggacagggatgactcacatgggaagaggaccccactttgttctgtttgattctaagaggacacagactgcttcattcatttcagtttccccagcacctggcttaactctcagacatgttagacggtttgtaagcaccggctctactgaactggcatcaaatcatgacctggttcagaagagacacgaggactggatctgttctaaacagattgtgcaaaggggaaagacacagactcagcatttccacagcttttaacatttcagcgagaggtgagaaagcatgtcaggaacacaggccccggccgatgaaagtgtctgatgctaacacatgaactgtcttctgctgggcacactaaggggccacaagcaagctacgccccagagccactccacattctctctgggtgcactggccctcggccacgcaaggccgcgccagcctccgaggtgagccagaaggacacacacctgtggactcgatgtccctgacttgggctcgatggccagccccagggtgactccgcccgccagcgctttcttcaggctctccttgacctccgtcagctccagctccaggctgacacgctccgcctccttctgccggcactcctcctccagctgcttcagcttctcctccaggatcgcctgcggcttcctgcctggaattcccagaaacgccgttactcccgcggcaggcacaggttctccaaacaacagagaaggcacctggtccccaagaagaacttccacaaaacgtctgaggtcgagctcccctgacttaggtcctcgttgtgaaacttaaattcagcagttctctaagggatcagagtccttctcctaccatttccctttgctgcagccgttgaggactcggaccaggaaagaggagatgctgattctgacgaaggccaggagctcctggctctgggcctcaatgttctcattttaaaacgtggaccctaaactccacagttcccaaagctgccaccttcttggagtgtgaaccctgtcctcccctaacgctccgccgatccttcagtcatcttatttgcgcccgaggcaatgaacagtagctcagcttgcatctctactggacatggcacacatttctttaaggcacattcacttattttatttgaggtttgctgcagtgacctaagatgcacccactgggcagatgagaacaccaatcccaagaggtgaacggacttgtgcccagggcctgggccggtggtggccggcaggcgaggttctctttttcaaagccaaaagcactcctggccctcctgcatcttcactatcctgcaagctgggaacacgggagaaatgctacttctgtctcattaaactccatgccccgtcccattctctggcacagcctcctcccgtagggtcagcctcagactgcaggccacatcctgggcctcctatagggtcagcccgacctgccctgccaacacctgccttccctcctctaaactccaaaagcatttcccttcatcagatcattgaggcacaaagtccagcaaggctggagctgctaaccacctgctgggtgtgcgtcagctcctccccgcgcggcgagccatgggaaggccacagcctcttctctggaccacccagggctctgaggcatctgaagcccccgtcccagcccaggccagtacaatctcaatctaaggagccagtcttccgtagtctaagcaccgggctggaagggaggccatgcgtaggtaagcggtgccaccccaggctcaggagctgagcgccagctcccgccagcaggaattgcacgcgcctggcccagggctgccactctggctgcaaactcagtttctgtgacttcagtccctctctggtgtctgtattccattagcctggcctcttccctgatgcatcccaagacagatgctgccttgctctcgcctgtcccttctcaacaaacgaggggctgcttctacccttgtctggacttctgaatattactgacccctgtgggctaccctctgtagagaaatccagctgatccctcctacccggtgaccagaatctactgcgtcctgcggatacaggggccatcctccagacaatctctgttgtcagcgccagaagccggaacaggtcccccagcacctcccctgcctcggtgagcagcgtgtgggtctggccctggcctctgcctgcacgccgcatgtttgaccacacaggcacctgcctcggggttaccagcaatgtttccaagccccaagaaacactgtgagataacccactcttactaaataaaatgacagccttggtgagcaataggtcctttgggcaaagcagaatgaaatctccagtctctaatacaaacatgcaccctgggcagtcacccacacccttcataccggcgttcacttcaatagccgctcgaaggtcttttctttccttgcggagctgggccagcctattccgcagggcctctttcctcttcagcagctcctcctctttggtctgtagccgcttggcatctgcttctacccggttcttgccatacttgtactgggcagcatcttgagaagaaaaaaaagcagcaattaaaaattaggtttactagcctgggaaatatgggacgatcccttctccacaaaaaatacaaaattagccaggcatggcggcacatgcctatagtcccagctactcaggaagctgaggtgggagaatcgcttgagcttgggagcttgaggctgcagtgagctgtgatcctgccactgtgctccagcctggatgacagtgagaccccgtgtcaaaaaaaaattaggtttattcaagcagataatggggtaactcaaaaagcctgttgaatcagccaactcagtaaacaaacacaaagcattattttgctaattcaacaagaaaaggacagggctggtatgaaccaagcagaaaagtgactagttcaaattctccaatattctttgaatcaaattcttaaaaacgaaaacagaatattaggaaattcctttaattcacttccctttgaggcacacggcttataattaatctgcaacaaggtggagaatgaacattctataatcggaaaagacaggagtaatatcaaaaataatgtctgaaatttgcttccttctctacgtcttcaaatccttccctaacaccgcagtatctgttccttatggccatgtcatctgactggctctgaattgctgctacacccccagcactgagattagcacccggcacggagtgtggcacaataaatgcttgtttagtgaataaatgaacaacggatacatgaagaggcaaccaggagcggtatctggagcctgactgtctaggaaggagtcccagcttacacttgtagctgcatgacctggaacagggcacgaatccctctgtgcctcagtttccctcatccgtgaaatggggatagtaagagcaggcaattcactgagtggttacgaggattaaatatttataaagcacttagaacaaacacaaatgggcaacacataaatgcttatttcataaaatgaataaatgaagaggaaactagctgtagggaaaatttacagacttggcaacttcacatcaccagtgaaaacagctttcaaaacctgaccccatgctctctcctattatgttggcttttcaataacagtaatttaggacaacacctctttgttaagacacatggaagagatgaaggttctaacaaaactcggatggaggatcaccgatttcaaagcttccgtggtctcccagtcgcttctaacaatcactcacgcctgaaggcaactcccaggccttcctgactgcacaccccaagtgtctgactccctcacaaggctagaaactacttcaggtagaagccacaggggtggcataatgattaagaataaaaacactggactcagagaggtggctagaaacccacactccaccctcccttgctccatgactctgcaagcaacctccggagaagctcagcttcaccctctctaaagcagaacgagaaggaatcctgtgtgtgtgtatgtgtgtgtgcgtgcgtgtgcatgcgtgttttaaattagaacgttatatctgaaaaaaatctaacaaaatgatacgacgcctgatgtagtggacattcactgacaattcttaccatatcagcgataagtgattcccagagccttgtccactcagggacagcagggagccatttctagcacctgtcctaaatgctggatttgccaattcttgcaacgtaagttatcatgatttcaatgaaatactgcatttatgaaggcataaaaagtgatcactccccagtcaattttcccctaatcaaaagaaccacatagaatgacagcaaaagcgtcggcagcctgaggagaggcgaagcattcgacaatctgaaacaaaaggatcgctgtttgcagctaaggttaacaacatatttggcaaacagggccaagtccaaactctactcgcttatttctaaactaagctgtttccccaatgaactcaatgcaatcacctataaatttccacatcttttggtccccatgtaataaatcccatctaatctataatgcaaccggctggattcaagcaaaaacacggaatgccattatttttctcttttgtcaccattagacgtcaccacagttaataaaaactccctacagaacatcccataaaataaaggaataaatcatctaggaaataaagtcagcacaggtactgacagagaaacaccatggcgattgagactccgtgggactccgattttgcttgtaacaaagctttccaggtgtgagctgctcctctcccccatctgcccctcctcaaagaaacaacactaaaagaggtgaaagtaaatacacctgatacattcaggaaataagatttgccagataaggtcaaaggaagttagtacattaaacaaatggtggtaggagggaggatttggcccaactggctccaacctatctggtcaacacgtatgttgggtagaacagaggtggagaaaagcctagatcagggatgtatacgcttccttggggcagacgcagcctggccctgcggagcgatttcaagcctcgttcacgaacatggccaaggacactgccagcctcttcattcccctgtgtggatgctccaactccaaaagtggaaccacagggcaaatgaatgtcggcacgtgtcggtatggcagcctcgctcttcgacagctggtgtgggggttaccacctggggctagctggcctcatcttcgttagcactgagactggtctaccagttgcacagattcagatttgaaaatctcaggtgcaaatcccaagtggcgatggcatgtaaccacatcaaactcaacatctgcacctaactcccaccttctttctctgggaaatcttcctggacatgcccagatggactcaggagcccatcacctgtaaatccccacactgcagccctgccacttgcttgtctgcatgtgtgggtccgctggaccactttggtgtatctttgagccccttgagtgaaaaaatgctgcctggctggctccctgattagacatccaacataatgaggactaacaccaatacaaacacttaagagatgacatatcgccctagctggatctactacagggaagggaagagggtgctgggtccaggcaggctgagtgtctcatgtcttaatgcttctctgcccaatctatttccggctggatgtggagtctgaaggcctggcacccactctggctctgtgatttaccagctgtgagccttgggggagctgcttactctcttggtgattcttttctcatttctatgatggggtagaggataatgcctatgcttacaaagtggctgtgggaagtaaaccggatgggataagaatggcttgctgtggaccacaggcaccgcaggataaccattcctcagaactcctcatactgctctagtgcttggaggtccgtgtattacctcagctattccaaccgcaccaaccacgggagccacgtgtctacgtctgacagataaagatgctgagtttagagtctgcaaggcttgacaaccacagatcagggacaggagctgaggtctcctgacctggagcccagggccacccggagctgcaagaaacctgcactcacaactgcctcctattttaaaatgctgagtcgatcccacaggtggcaaaccagttctgggcttcaatttacaagcagtcagaaaagctgggttgaaatcgccactgtccttctatgtggctgatgaggaaggatgacggtgcccaccgctccatctctccagctgaccccaagctggcactcacgggtgggcaggctcagacaggcccagctccaccaagtgcacttgaagccggaatgcaagacatccgatggtatacttactcgaacccgtccttttcacaacagccgcgggatccgctttctttggctgactgctcagagtcttcccttttcctgtgaccccattagacgccacggggggctttttacccttgagctgttgaaataaacatataagaacattaaaaataaacacaaagtcaaaaaaaaaaaaaaaaa

SEQ ID NO: 1884 - protein, 91 aa, Homo sapiens [sequence omitted]

SEQ ID NO: 1885 - protein, 56 aa, Homo sapiens
MTWFRRDTRTGSVLNRLCKGERHRLSISTAFNISARGEKACQEHRPRPMKVSDANT

SEQ ID NO: 1886 - protein, 56 aa, Homo sapiens
MLTHELSSAGHTKGPQASYAPEPLHILSGCTGPRPRKAAPASEVSQKDTHLWTRCP

SEQ ID NO: 1887 - protein, 100 aa, Homo sapiens
MASPRVTPPASAFFRLSLTSVSSSSRLTRSASFCRHSSSSCFSFSSRIACGFLPGIPRNAVTPAAGTGSPNNREGTWSPRRTSTKRLRSSSPDLGPRCET

SEQ ID NO: 1888 - protein, 195 aa, Homo sapiens [sequence omitted]

SEQ ID NO: 1889 - protein, 90 aa, Homo sapiens
MTALVSNRSFGQSRMKSPVSNTNMHPGQSPTPFIPAFTSIAARRSFLSLRSWASLFRRASFLFSSSSSLVCSRLASASTRFLPYLYWAAS

SEQ ID NO: 1890 - protein, 104 aa, Homo sapiens [sequence omitted]

SEQ ID NO: 1891 - DNA, 1450 bp, Homo sapiens
gttggtgctcagagtgtggtcaggcggctcggactgagcaggactttccttatcccagttgattgtgcagaatacactgcctgtcgcttgtcttctattcaccatggcttcttctgatatccaggtgaaagaactggagaagcgtgcctcaggccaggcttttgagctgattctcagccctcggtcaaaagaatctgttccagaattccccctttcccctccaaagaagaaggatctttccctggaggaaattcagaagaaattagaagctgcagaagaaagacgcaagtcccatgaagctgaggtcttgaagcagctggctgagaaacgagagcacgagaaagaagtgcttcagaaggcaatagaagagaacaacaacttcagtaaaatggcagaagagaaactgacccacaaaatggaagctaataaagagaaccgagaggcacaaatggctgccaaactggaacgtttgcgagagaaggataagcacattgaagaagtgcggaagaacaaagaatccaaagaccctgctgacgagactgaagctgactaatttgttctgagaactgactttctccccatccccttcctaaatatccaaagactgtactggccagtgtcattttattttttccctcctgacaaatattttagaagctaatgtaggactgtataggtagatccagatccagactgtaagatgttgttttaggggctaaaggggagaaactgaaagtgttttactctttttctaaagtgttggtctttctaatgtagctatttttcttgttgcatcttttctacttcagtacacttggtgtactgggttaatggctagtactgtattggctctgtgaaaacatatttgtgaaaagagtatgtagtggcttcttttgaactgttagatgctgaatatctgttcacttttcaatcccaattctgtcccaatcttaccagatgctactggacttgaatggttaataaaactgcacagtgctgttggtggcagtgacttcttttgagttaggttaataaatcaagccatagagcccctcctggttgatacttgttccagatggggcctttggggctggtagaaatacccaacgcacaaatgaccgcacgttctctgccccgtttcttgccccagtgtggtttgcattgtctccttccacaatgactgctttgtttggatgcctcagcccaggtcagctgttactttctttcagatgtttatttgcaaacaaccattttttgttctgtgtcccttttaaaaggcagattaaaagcacaagcgtgtttctagagaacagttgagagagaatctcaagattctacttggtggtttgcttgctctacgttacaggtggggcatgtcctcatccttcctgccataaaagctatgacacgagaatcagaatattaataaaactttatgtactgctgtagc

SEQ ID NO: 1892 - DNA, 599 bp, Homo sapiens
gggtcgaggtcgacgggtatcgataagttttttttttttttttttttaaaggagcaatgacatttcctagaagttactctaagaatttccctagagggtcgggtatcatctcagccagatctttctcatccttcaaggccctgtttggtacagcttgctaggaagctgttccagactgcagcagccctctctggggtctctctaccacttcccaggcactcagaacttgtgcctcagtagactgttttgtggcactgtcccattctctgattctccatgtgagctggttttatcccatccagcatggctgtgaaatcctaaaggttcaaaccccagccactcttcacctatatttcccccaaatggctagcacgggaaagggcccaaagtaggtgctcagtgctgatgagagagtagaatttaaataccccaggaagcattgtgagttactacggaggccatgaaatgctgccacctccccaagctgattaaagagtgatactaggaaaataggtagggaagggctaatcagaaatgcctctggttcagaagatgctgagttttaaagtccagagagccaaagaaaaaaaaaaaaaaaa

SEQ ID NO: 1893 - DNA, 8372 bp, Homo sapiens
  misc_feature 2677, 5116, 5117, 5121: n = A,T,C or G
aagcttggtgccatctattttggactatgccttgcatacagctttatgggaacatttgtcaggcaaaagtataataatggcaaactctacgccttttattttaaattagattggtgtgatttgatgctgacgggagtgagagtaatggccttatcctgctgcaggctgtgctgaggatggcctggtctgccaccctcctcgagtagcattttgcatgtgtaacagggtctcccctctggggcacaacaacaaagagaagttgctaaggacaagaagcaggtgcggaaatgcatctcccattggaacagccctgggcttactccaatggctgagagaggtgctatggccagtcctcccagagctctgcagctgcacttgggggtggacagtctcgtgcttgtcctgcgtgataacggccgtgaaagccagccaactgctgcccaaaatcacccagccgattgggggtttcccatcggcgcaccctgcccggagccaagaagacaggctggtgctgctgtatttgtatttatatccattgctgcgctctgcgttctcgtggcacgcctggacactcctccgcctccccctcctcttcctcctccagggccacctccccgccttccccacccccatctgcttctgtcaaatgagaaagtcaccgaggagaacccaaacactccagccgctgagagccccctttggcacttggcagcacgcggcggcgggctcctcggctcaacttcgaggagtctccgcgacgcaacttttggggacgctttgcatttaagagagaacgaccgaggaggaggagcgctctgcccggccgccgctacctgcggggagctcaccagcaaacgccactgcagacgaaggacccaaagaacgtaaagggcaaactgccgccgcggggagggggcaccgccgagaagttagagtgtcccagagacaacctgctcgagcgctcggccggagacactaaggcggcccggggcgcggcgtggccctggctggtcccccagccccctcctccggggcgggagcgacgccggggcgcgacgagccccggccggccgagcgggtctccgcgggcagccaacattgatttcctccgggccgagggcgagggcccgggcggcggcgggctgcagccgcggcagggcgagagcatgtccaagccggtggaccacgtcaagcggcccatgaacgccttcatggtgtggtcgcgggctcagcggcgcaagatggcccaggagaaccccaagatgcacaactcggagatcagcaagcgcttgggcgccgagtggaaactgctcacagagtcggagaagcggccgttcatcgacgaggccaagcgtctacgcgccatgcacatgaaggagcaccccgactacaagtaccggccgcggcgcaagcccaagacgctcctcaagaaggacaagttcgccttcccggtgccctacggcctgggcggcgtggcggacgccgagcaccctgcgctcaaggcgggcgccgggctgcacgcgggggcgggcggcggcctggtgcctgagtcgctgctcgccaatcccgagaaggcggccgcggccgccgccgctgccgccgcacgcgtcttcttcccgcagtcggccgctgccgccgccgctgccgccgccgccgccgccgcgggcagcccctactcgctgctcgacctgggctccaaaatggcagagatctcgtcgtcctcgtccggcctcccgtacgcgtcgtcgctgggctacccgaccgcgggcgcgggcgccttccacggcgcggcggcggcggctgcagcggcggccgccgccgccggggggcacacgcactcgcaccccagcccgggcaacccgggctacatgatcccgtgcaactgcagcgcgtggcccagccccgggctgcagccgccgctcgcctacatcctgctgccgggcatgggcaagccccagctggacccctaccccgcggcctacgctgccgcgctatgaccccgcggggccgcctcgcgaggaccggtgtgcacacgtgtacatatgtataggtacgagcgctgcggcctccccgtgcgccctcccgcgaccgggggcccggtttgtatgtacatagaatgtataggtgccaggtagaggcagagaggccaggcggggcaggagtggccaagcgcgcaagggcgcgggcgagcaggcctgtgaattcgcaggatcatttcagacccgcacttcggcagccaactcgaaagcaggcggttgtgtgcggcagcagttggcgtttgctttgcacttcggaacctgttgcgttttgacccacggaggtggaggagtaactttttgacatgttggcctttccagttttgttggaagtttcatggtcggttttgtttttgtttctcattcttcttcctcgcccctcagccccccaacccccaaccccctcccggtccgtgttgcatgcacgctgttcaaatgtgaggtctgaaatggctggcacacgggaaaagctgcttgtgtcattcgtttctgggagtgggatggctctgagcagcctcgcctccctgtttgtactatttgaactttgcagatctctgttctctcaagcagaactcccaaccagatccattcttgaccagtgaccggctcgaatctggccttttgtgtgagatgatcacggnttcttttgtttatcacgccatttgcaaatcagagcaagagctctttctcaagggcaagaaacgcaaacaagaaatatttgtgagatgaaagttgtcaattggattttcttcctaaacaaacaacaacaacaaactactagaagtctccctgagtccactcgcttggatttctgacacagtttacaaaaaaggaaaaaggcactgctcctattttcccttatggctgagttcaccttaagattgtaaatgtgtatatgtcagtgaaaacattgaggcttggaaaatgtgttattttcgttgccctaagtttgagtcgactttagactcaaaaacattttgagcgaatatcaaagttaacttttaaaaattgcgaaactatttcagaatcgcaattttatcgaagattaaatcagacttttttgtctggtaattatatatttattatttagcaaaactgaagaaaaaaagcacagaattgtttcaacagatgtctctcattttcagctagcatttctctcccaagttgagctggtttaatgtgttttggatttccctcctcaattggcttattttttagatcacctgcaattcatttgcaaattgcaataaaacacattttagaaaaaaggaaccttcaattattagctttgtttctttttaaatgtatatattttgactaatgtttgtgaatgaagttggctaacatgtatttagtttcattttggctttatgtaatataaagtttttaaaattttaaatatggttttaacctttatgtgtaaatgattttctagtgtgaccttctaatttaatattagacgtctaaggtatatctgtaaattagaatccgactatcactctgttcattttttttgaacaaagagtttaaataaagcctgaaccagggaaaagaaaaatcttctatttcttgttgagttcctaacaagatttttatctgaattgcccttacgtgcctggtccaggtgaagtgtaaggtatcctccaaaggcaccctttgtttcacttttgaatagatttactaggaaatctaaatcaagccattgttattcagagccaaaaacctgatttatcacatttttaatcgtgaataggaaagaagatttttaaaaagcccaagtcgttgtattagctttaacaacaacaaaaaaaaggcattcatgaaccagtagaacagagcccattgaaaacatccagacctttcaaagcatttcaccagtttctagtaacattttaagaggggaaagttgcttgaccactttatcttgttagttgaagagccccaccacttaaatcagtgtaatttgttctcctatctttggggtattccttgttgacaccttaaggttttatttggaaggataatcactactaacgacaaagtacaaattttggcctctttaggacttaattttgttatgctaatcgcattaaagtagaagtataacattcaaatggagagggttggatttctagggctagacaaattgctactaaagtttgaaaaatcataaaggattttaattttagacaagaaatagaagactgtcagaaaaaaaaaaataggaagatctcgcccccccgcaaccaaaatggaaattctcaagatactatatacaagtcttaaaccagtttccccattgagaccatctctggagctgcacgtctttataaacgacccaagtctttaaagtcattgttttcccccaacggaataatattttaaaaaccatgaaaagttttggaaatgtgagaaataggctctgctggtttgaccctgattcactaattaaaatgatccctctcctgttattccctgagctctttgcaatattataagttaattcatatggttctgagcgattatgcaaaactaatttggactgtccaggggtaattatccctgacacggttaattaaatcctttcaaggcttcgtctttcccttttgtagcagcccatcccttctcaacacggaacttctgcggctcgctggaaatcaccccagccctaaatcttagttaccaccctgagccttccagctcggccgcctcctcggcctgaagactccccgcctcctcccgccccctccccttttcccaaagatcagcgttttctgggagaaacgctccggagttgttgatgaatgagaagaggactggaaagatgggtaagaggaggggtgaggatgccgagggggagcaccgaggtcatatcgccaacagattgtgcggctgtttgaggacctccacaggccccacagactcgtttatcacccattctgactccaatggtcttgctaacaagttggcgggttttgcgcctgcagagagcctcctgccaagttagactgtgcagaagtaaggggttggagcggggggagcggctccggggcaagagggcgtagagaaaggcccggggnngggnggtgtaagcgtctgaaagtggcccacaaatgcagcgctgtgattgggcagagagctgctgctggctcgcgatctctatctccatctctttatctatctccgtctctctccctgtttctccatttttctttctttccttctctctccttccttccttccatctttcttctttcccttccttttattcttctattttcgtttcttttcaaggttttttttaaagccatgatgcaatttctttggtattcaccgttgtcccaaaacttgaagcaagcctcgtatccaaggggccaggcatgttgcttcgggctttgtgcaaacaggtggaattgcgctgtgtaagcagtaagaactggtgctggggagctgtcgcgcgagggggtggctttgggagagcagggttgctggccgcgattgttacttcccttgacaatttcctcctccccctcccccaagaagataggagaaagcaccgcggatctccctctcaccccaggctcggggcgcagaagatggagagaagattccactctccccggagcagatagggacggtcgcgccagccaatcagagcgcggctcggcgccggcgctcccggccgcctgggccgccgtgtcctccaggcaagcgaagttcccgcaactcgtccgcctcgagggtccgcgtctttcttgcgcccgcggcccagcggaggccgagggagccgtccaaactttattaatctctcctcctttctttctccctcagcccagtgcatctcaaaggtcagccctcttcttttaaaagactgatattattaatgcactgacaattcctcccccccttttcttttttctctcttgcaggggggaaaaaaagggaaatggtgaaaagagctttttttatcctttttttttttttgtccttcagtgggagcgtttagacagtcgaggaggttttgtccgagaacaaaacgcagggttgggaggttttgtgagagtgttgtttgttgaagtggagctaagaaaaagcggcggctttctcctcattgtgaagaaaccaatcagtggtatttggaaaactgttagcattgtgcacttcttctgtgtccattgtgaggcgtttcttttcacaaggtttttttttcagccgatccagctggccggaatgaatagcggtgcaatgtgtacacgctttgtccctccggccttcaagtagcccccattgaatagactaagttgacctgcgtgacagtgaaacaacataataaaaaatacatgagcccctgaataggagcaggcgcataaataaataaaatgggtgaccaaaactggataaactgaatgacaaaacggtgaaaggggaacaaaaagatatttaacacgctagattagcattagaatgcgatctacaaggcagaacaattgatgaataggtttaccggccaagaaagaaatggactaaatgccctttgaatagatatgctttttgcaagggctttgaatagatatgcttttgcaagggctgaatgggaaaaggtaaagatgaagctatgcaaatgagccggggaactttttatatatattctttaaacacacacacacactgcggggggaagagtgctgcctcgggatgtttatagaagcaataattgccattattagcattgtctgcggcagatagaaattgaacaggttgggataatatagggtagcagtaattattcttctaattaatggtcctttgctacttgaaaaaagaaaaaaggaaagaagtagtaaaagttatgcagaagttatgtttccttgtgtccatttgcccagcgctggaatctgtggagcaggaagcctggcaattccaagatacgcgatgatcytcaaacattcccgggagccagtcctgaggctctggcttcagggcctagtttccatttatgccgcgtttttgagagtctaatactgtgtctggcacatggtaggtgctcactgaatagtcgtggtatgaatgaatgaacgaatgaatgaatgaatgaatgaatataagtttaatgggggaaacccgggcctcctaataaaggtaggggctgggggatacctaggggcttccccaggaggatttcttttttcatcatcccacccctgggagaaaggtccacgcaggatggtcgcttcccccttgctgagagttttgccttcagcctatctgggccgctggaaaagaggagaagaataaacaagagacaagcaactactcccctaccggcgttccgtccttgtcctcactgccaaatccactccaaagccgaggatggtgagactgtgaagttgcaaagaaacacagagcccacccccttaaagaattacgatatatttaaagtttgcctctttcaggtttctctccttggctcctgcccctttcccctcccggctccttgtccttgactgaacctcatgggacagagaacctcctgtcccccacgaggcaaggcgcgaacccgcagagatctggggtgccctttggttccctgcgctgccctggaggcgtccatagaggcctttgccgccaaggacagcaattgttttattttcgatggttgctcgccaggctgcgggtcgcgggcccacccagccgtcgaactttccagtcgttatcagcgctgctcctaacttaatggaataatgcaaattatagcctgcccagctgacacgtccctgcgaatgcgccggggctgagctctggccagccgctctctcgacgtcctggacggccggagggaatgaagctctgaattgtgacaaaagtggggggggcaccccaaattctcaaagcaatgttcttttttttttcttttttcttaagcaattgagccttaccaaatgtcggggccggccgcacggaagccttgcatattttaaagtgtaacctgagccttcgcggtttcagcttcacttaaaacatgcaaattcttgaaattgaaaaatctgaaaaacttccgaagagttctatctgaataaatccaaatccattgggagtcgctttgaggagacaaaacgcacagcgatttggggtgagggatatttgtggggaggcaggacgtgctggattgggtttccagggtcaaggtgtctctgggccttcgacgatagccttagcgcagagcagggaagtggcaccgctaggcagcaagctcagttgctctacttttgtgacccatccccccaccccccccaccgccacccttgcctccgggccactgcccctctctgcaagctt

SEQ ID NO: 1894 - DNA, 6942 bp, Homo sapiens
ggcatggaacctaaagactagaggcggttgtgtgagtcaggaagaggggccagatatctgagtgttcctctttagtttcttcaattgcagataatatggtgtctaattttatgttgttcaggaaagacagtggttcctgactcaggaagacagtctcagaaacatgtggaatgatattgagctgctaacaaatgatgataccggaagtgggtacctgagtgtcggttcaagaaaagaacatggaactgctttatatcaagtagatttgctagtgaagatctcttctgaaaaggcctcattaaatccaaagatacaggcatgcagcttaagtgatgggtttattattgtagccgaccaatcagtgatattgcttgacagtatttgtagatcacttcaattgcatcttgtctttgatactgaagtggatgtagttggcctttgtcaagaaggaaagtttcttttggttggcgagagaagtggcaacctacatcttattcatgtaacatcaaaacaaacactactcactaatgcatttgttcagaaagctaacgatgaaaatcggcggacttaccagaatcttgtcattgagaaggatggttcaaatgaaggtacctattatatgctacttcttacatacagtggatttttttgtattacaaaccttcagcttttaaaaattcaacaagcaattgagaatgtagacttcagtacagcaaaaaagttacaaggacaaatcaagtccagttttatttctactgaaaattatcatactcttggttgtctcagtcttgtggctggagatttagcaagtgaagttcctgtgataattgggggaaccggtaattgtgcattctcaaaatgggaaccagattcttccaagaaaggaatgacagttaagaaccttattgatgcagagattattaaaggtgcaaagaagttccagctgatagacaatctactttttgttcttgatactgataacgtgctgagtttatgggatatttacactctaactcctgtatggaactggccctctcttcacgtagaagagtttcttcttactacagaagcagactctccttcatcagtcacgtggcaaggaattacaaatctcaaattaatagctctgacagcttcagctaataagaagatgaaaaacctcatggtttattcattacctacaatggaaatactatattctttggaagtatctagtgtttcttctctggtccaaacaggaattagcacagataccatataccttttagaaggagtttgcaaaaatgatccaaaattgtctgaagactcagtctctgtgttagtactcagatgtcttacggaagctttaccagaaaacagattgagtcggttacttcacaaacacagatttgctgaagctgagagttttgccattcagtttggactagatgttgagcttgtttacaaggtcaagtcaaatcatatattggagaaactggcattgagttctgtggatgccagtgaacagaccgaatggcaacaacttgtagacgacgctaaggaaaatctacataagatccaggatgatgaatttgtggtgaattactgcctgaaagctcagtggataacctatgaaaccactcaagagatgctgaattatgccaaaaccaggcttttgaagaaagaagataaaactgctctcatttattctgatggcttgaaagaggtgctaagagctcatgcaaaattgactactttttatggagcatttggaccagaaaaattcagtggcagttcttggattgaatttctaaataatgaagatgatcttaaagatatttttttacagctaaaagaaggaaaccttgtttgtgcacagtatctttggcttcgacatcgggcaaactttgaaagcagatttgatgtgaaaatgctggagagcttgctcaactcaatgtctgcatcagtctctttgcaaaagctgtgtccatggtttaaaaatgatgtgattccatttgtaagaaggactgtgcctgaaggacagataattcttgcaaaatggttggaacaagcagccaggaaccttgaattaactgataaggcaaattggccagaaaatggacttcaattggcagagatattttttacagcagaaaaaacagacgagttgggattggcatcttcctggcattggatttccttgaaagattatcagaacacagaggaagtatgtcagctaaggactttggtaaataacttgcgagagttgatcacgttgcataggaagtacaactgcaaattagccctctctgattttgagaaggaaaatacaaccaccatagtgttccgaatgtttgataaagtgctggccccagagcttattccctccatcttagagaagtttataagagtttacatgagagaacatgacttgcaagaggaggaacttctcttgctgtacatagaggatttactgaatagatgcagctcaaagtccacatcactctttgaaacagcatgggaagcaaaggccatggcagtaatagcgtgtttatctgacacggacctcatatttgatgccgtgctcaagatcatgtatgcggcagtggttccttggagtgcagctgtggagcaactggtgaaacagcacctggaaatggaccatcccaaagtcaagttattacaggaaagttacaaactaatggagatgaaaaaacttttacgaggctatggaataagagaggtaaatctcttaaacaaggaaataatgagagtggttagatacattctcaaacaagatgtcccatcttctttagaagatgctttaaaggtagcccaagcgtttatgttatctgatgatgagatctacagtctaagaattattgacctgattgatagagaacagggtgaagactgtctccttctgttgaagtctttgcctcctgctgaagctgagaaaactgcagaaagagtcatcatatgggcacgactggcattacaagaagagccagatcattctaaagagggcaaggcctggagaatgtctgtagcgaagacatccgtggacattcttaagatactatgtgacattcagaaagacaatctgcagaagaaggacgaatgtgaagaaatgttgaaactatttaaagaggttgctagcttacaggagaactttgaggtctttctttcatttgaagattatagcaatagttccctggtagcagatctccgtgagcagcacattaaagctcacgaagttgcacaggcgaaacacaaacctgggagcaccccagagcccatagctgctgaggtgaggagcccaagcatggaatcaaagctgcacagacaggcactggccctgcagatgtccaaacaagagctggaggcagagctgaccttgagagccttaaaagatgggaacatcaaaacagcactgaaaaaatgcagcgacttgtttaagtatcactgcaatgctgacactgggaaattgctatttctgacatgtcagaagctttgtcagatgttggctgataatgtcccagtgacagtgcctgtgggactgaatcttccttccatgatacatgatctagcaagccaagctgccaccatttgcagtccagattttttactagatgctttagaactatgtaaacatactttaatggctgtagagctttccagacaatgccaaatggatgactgtggaatcctcatgaaagcttcttttgggacacataaagatccatatgaagagtggtcttacagtgacttcttcagtgaagatggaattgttcttgagtcacagatggtgcttccagtgatttatgaactgatttcatctcttgtgcctctagctgaaagcaagagatatcccttggagtctaccagtttgccatactgctcccttaatgaaggagatggccttgttttacctgttataaattccatctctgccctgcttcagaatcttcaggaatctagccagtgggagctagccctaagatttgtggttggttcatttggtacctgtcttcagcactctgtgtcaaacttcatgaatgccactttgagtgaaaagttatttggagagactacattagttaaatcaaggcatgttgttatggaattgaaagaaaaagctgttatatttatcagggaaaatgctacaacactactgcacaaagtatttaattgtcgcttggtagatcttgacctggcgttgggttactgcactctcttacctcaaaaagatgtgtttgaaaatctctggaagctcatagataaagcatggcagaattacgacaaaatcttggcaatatctctggtgggctctgagctggcaagtctctatcaggaaatagaaatggggcttaagttccgtgaactcagtactgatgcccagtggggcattcgtcttggtaaacttggtatttcttttcaaccagttttcaggcaacattttctcaccaagaaagacctcattaaagctcttgtggagaatatagatatggacacaagcctcattttggaatattgcagcacatttcagttggactgcgatgcagttcttcagctcttcattgaaacgctgctccacaacacaaatgccggccaaggccagggagatgcaagcatggactctgcaaagcggcggcatcccaaactcctggccaaagcccttgagatggttcctttactgacgagcacaaaagatttggtcatcagtcttagtggaatactacataagctggatccttatgactatgaaatgattgaagttgtcttgaaagttatagaacgagctgatgaaaagataaccaatattaatattaatcaggcattgagtattctgaaacatttgaagtcatacagaagaatttctcctcccgtggatctagaatatcagtatatgttggaacatgtcataactttgccatcagctgcccaaactagactgccttttcacctgatattctttggcacagcacagaacttctggaaaattctctctacagaactcagtgaagaatctttcccaacattgctcttaatttcgaaattaatgaagttctctctggacactctgtacgtgtctacagcaaaacacgttttcgaaaaaaaactgaagccaaagctcctgaagttaacacaagctaaatcctcaacactgattaacaaggaaataactaagatcacgcagaccatcgaatcctgcttactctctatagtcaacccagagtgggctgtagctattgccatcagccttgcccaggatatccctgaaggttccttcaagatatctgctttgaaattctgcctttatttagctgagagatggctacagaatatcccatcgcaggacgaaaaacgtgaaaaagccgaggctttgttgaagaagcttcatatccagtaccggcgatcgggcacagaagctgtgctcatagcccacaagctgaacactgaggaatatttaagagtgatcggaaagccagcacatcttattgtcagtctctacgaacatcctagcatcaatcaaagaattcagaattcatctggcacagattatcctgatattcatgcagcagctaaagaaatagccgaagtcaatgaaattaatttggaaaaagtctgggacatgttgttggaaaaatggctatgcccttcaacaaaacctggtgaaaaaccatcagaattatttgaacttcaagaagatgaagccctacgaagagtgcagtatctcctcctgtctcgtccaattgattatagttcaagaatgctgtttgtatttgcaacatcaactacaaccacattaggtatgcatcagttaacttttgcccatagaactcgagctcttcagtgtctcttctatttggctgacaaggaaactatagaatctctctttaaaaaacccattgaagaagtgaaatcttatttgagatgtataacttttctggcatcatttgagactttgaatatccccatcacatatgaattattttgcagcagtcctaaagaaggaatgattaagggtctgtggaaaaaccacagccacgagtccatggcagtaagattggtgactgagctgtgtttagaatacaaaatctatgacctgcagctttggaatggactcttgcaaaagcttctgggcttcaatatgattccttatctaaggaaagttttaaaagccatctccagtatccattctttatggcaggttccctacttcagcaaagcgtggcagcgtgtgatacagataccactgctttcagcctcttgtcctttaagtcctgatcagctgtcagattgttctgagagtctcatcgctgtcctcgaatgtccagtctcaggtgatcttgacctgatcggagtcgccaggcagtatatccagttagaacttccggcttttgcattagcttgtctgatgctcatgccccactcagagaaaagacaccagcaaattaagaattttctgggttcctgtgaccctcaggttattttaaagcaattggaagagcatatgaacacgggccagctagcaggattttcacatcaaattagaagtctgattttgaataatatcatcaataagaaggagtttgggattttggcaaagaccaaatactttcaaatgttgaagatgcatgcgatgaataccaacaatatcactgagctagtgaactatttggcaaatgacttaagtttagatgaagcttcagtcttgataactgaatattcaaagcactgcgggaaacctgtgcctccagacactgctccctgtgaaattctgaagatgtttcttagtggattatcgtaaatcactgaacctttttttcaagaaggacaagaattttggagtctgctattaatggaccatatttattacagtttttaaattgtacaatctctgtattatagctatttgtctaacattaccccacatgtaataaataaaacaatatgagc

SEQ ID NO: 1895 - DNA, 884 bp, Homo sapiens
ttgctgcgttgtgaggggtgtcagctcagtgcatcccaggcagctcttagtgtggagcagtgaactgtgtgtggttccttctacttggggatcatgcagagagcttcacgtctgaagagagagctgcacatgttagccacagagccacccccaggcatcacatgttggcaagataaagaccaaatggatgacctgcgagctcaaatattaggtggagccaacacaccttatgagaaaggtgtttttaagctagaagttatcattcctgagaggtacccatttgaacctcctcagatccgatttctcactccaatttatcatccaaacattgattctgctggaaggatttgtctggatgttctcaaattgccaccaaaaggtgcttggagaccatccctcaacatcgcaactgtgttgacctctattcagctgctcatgtcagaacccaaccctgatgacccgctcatggctgacatatcctcagaatttaaatataataagccagccttcctcaagaatgccagacagtggacagagaagcatgcaagacagaaacaaaaggctgatgaggaagagatgcttgataatctaccagaggctggtgactccagagtacacaactcaacacagaaaaggaaggccagtcagctagtaggcatagaaaagaaatttcatcctgatgtttaggggacttgtcctggttcatcttagttaatgtgttctttgccaaggtgatctaagttgcctaccttgaatttttttttaaatatatttgatgacataatttttgtgtagtttatttatcttgtacatatgtattttgaaatcttttaaacctgaaaaataaatagtcatttaatgttgaaaaaaaaaaaaaaaaaaaa

SEQ ID NO: 1896 - DNA, 787 bp, Homo sapiens
gtgtggacactcctaggatagaaagtttggtatgttgctatacctttgcttctcccaccttccccaatatctaatatgtatttctcattcttagaataatccagaatggctactctgatctatgttgataaggaaaatggagaaccaggcacccgtgtggttgctaaggatgggctgaagctggggtctggaccttcaatcaaagccttagatgggagatctcaagtttcaacaccacgttttggcaaaacgttcgatgccccaccagccttacctaaagctactagaaaggctttgggaactgtcaacagagctacagaaaagtctgtaaagaccaagggacccctcaaacaaaaacagccaagcttttctgccaaaaagatgactgagaagactgttaaagcaaaaagctctgttcctgcctcagatgatgcctatccagaaatagaaaaattctttcccttcaatcctctagactttgagagttttgacctgcctgaagagcaccagattgcgcacctccccttgagtggagtgcctctcatgatccttgacgaggagagagagcttgaaaagctgtttcagctgggccccccttcacctgtgaagatgccctctccaccatgggaatccaatctgttgcagtctccttcaagcattctgtcgaccctggatgttgaattgccacctgtttgctgtgacatagatatttaaatttcttagtgcttcagagtttgtgtgtatttgtattaataaagcattctttaacagaaaaaaaaaaaaaaaa

SEQ ID NO: 1897 - DNA, 1838 bp, Homo sapiens
gtcgacggctggtttgaaaagtgacaacggccggtggattttaggagtttgctcggtttgtaactgctctttggtgagctactgggactgcagactaggaggagactcccaaaatggaaactctgtccttccccagatacaacatagctgagattgtagttcatattcgcaataaactgttaactggagcggatggcaaaaacctctccaagagcgattttcttccaaacccgaagcctgaagtcctgtacatgatttacatgagagccttacagttagtgtatggggtccggctggagcatttctacatgatgccggtgaacatagaagtcatgtatccacatataatggagggcttcttaccggtcagcaatttgttcttccacctggactcgtttatgcccatttgccgggtgaatgactttgagatcgccgatattctttatccaaaagcaaaccggacaagtcgttttttaagtggcattatcaactttattcacttcagagaaacatgcctggagaagtatgaagaatttcttttgcaaaataaatcctctgtggacaaaatacagcagttaagcaatgcacaccaggaagcattgatgaaactggaaaaactcaattcggttcccgtggaggagcaggaagagttcaaacagctgaaggatgacatccaggagctgcagcacttgctgaatcaagacttcagacagaaaacgacactgctgcaggagagatataccaaaatgaaatcagatttttcagagaaaaccaagcatgttaatgagctaaagttgtcagtagtttctttgaaagaagttcaagacagtttgaaaagcaaaattgtggattctccagagaagctgaagaactataaagagaagatgaaggacaccgtccagaagctccgcagtgccagggaagaagtgatggagaagtatgatatctatagagattctgtggattgcttgccttcctgtcagctggaggtgcagttatatcaaaagaaatcacaggaccttgcagataatagggagaaactaagcagtatcttaaaggagagcctgaacctggagggccagattgatagtgattcatcagaactaaagaaactgaagactgaagagaactccctcataagactgatgactctaaagaaggagagacttgctaccatgcagttcaaaataaacaagaagcaggaggatgtgaaacagtacaagcggaccatgattgaagattgcaataaagttcaagaaaaaagagatgctgtctgcgagcaagtaaccgccattaatcaagacatccacaagattaaatctgggattcagcagctaagagacgccgaaaaacgggagaaactgaagtctcaggaaatcttggtagacttgaaaagtgctttggagaagtaccatgagggcatcgagaagacgacggaggagtgctgcactagaataggagggaagactgccgagctgaagaggaggatgttcaaaatgccgccctgatcaacagccacccgaaaatggcctttcgctttctgtttggagtagttatattgaagctaatagaaggaccgcagtctcagctaactagcgtgggtaccattggttctctgtccttttatgaccatgtgctccctgtgtttttttcttggtgatggggatacaactcagggccttgcaggctacactgacttgcctccctaggctctaatgtaccatgtactatgtaggcttttgctacaattaaagtaacgtgtacagcttttatgtccctactctgtctccttttgtatgtgctggttggaataaacaaatagttactgacgtcaaaaa

SEQ ID NO: 1898 - DNA, 2103 bp, Homo sapiens
ctctgccgagcctccttaaaactctgccgttaaaatgggggcgggtttttcaactcaaaaagcgctcaatttttttcttttcaaaaaaagctgatgaggtcggaaaaaagggagaagaaaccggcaccctctctgagaggcaacagaagcagcaattgtttcagcgaaaaaagcagcaagggagggagtgaaggaaaaaagcaaaaaagggggcgacacgcaagtgcctgtaggggtgaaaggagcagggaccggcgatctagggggggatcagctacaaaagaaactgtcactgggagcggtgcggccaaggaggaagcagtgctgccaggctctgctccagggcacagctggctggcggctgccctgtccgcagcaaaggggcacaggccggggaccgcgagaggtggcaaagtggcaccgggcgccgaggctgctgagcgctcgccgagacgcggaccggactggctgccccggaactgcggcgactctccctactcagaacttggcctacgtttcccaggactctccccatctccagaggcccccacaaaaccgggaaaggaaggaaaggacagcggcggcagcagctcaatgagtgcctacagcagaaagcctgaacgagctcggtcgtaggcgggaagttcccgggggctgcccagtgcagccgcaatgctgccgcgagctgccccagcagtccgggctccgtagacgctttccgcatcactctccttcctcgggctgccgggagtcccgggacctggcggggccggcatgacgggcttctcgggggcccgccgcacgcccggcagcctccggagacgcgcgccgagcccggctcccacggcctctgaggctcggcggggctgcggctgcctggcgggcgggctccggagctttcctgagccggcattagcccacggcttggcccggacgcgaccaaaggctcttctggagaagcccagagcactgggcaatcgttacgacctgtaacttgagggccaccgaactgctactcccgttcgcctttggcgatcatcttttaaccctccggagcacgtcagcatccagccaccgcggcgctctcccagcagcggaggacccaggactatcccttcggcgagacggatggaaaccgagccccctggaggacctgcccctgcagttctgcctcacacggctcaagtcaccaccgtgaacaagggaccctaaagaatggccgagccttgggggaacgagttggcgtccgcagctgccaggggggacctagagcaacttactagtttgttgcaaaataatgtaaacgtcaatgcacaaaatggatttggaaggactgcgctgcaggttatgaaacttggaaatcccgagattgccaggagactgctacttagaggtgctaatcccgatttgaaagaccgaactggtttcgctgtcattcatgatgcggccagagcaggtttcctggacactttacagactttgctggagtttcaagctgatgttaacatcgaggataatgaagggaacctgcccttgcacttggctgccaaagaaggtcacctccgggtggtggagttcctggtgaagcacacggccagcaatgtggggcatcggaaccataagggggacaccgcctgtgatttggccaggctctatgggaggaatgaggttgttagcctgatgcaggcaaacggggctgggggagccacaaatcttcaataaacgtggggagggctcccccacgttgcctctactttatcaattaactgagtagctctcctgacttttaatgtcatttgttaaaatacagttctgtcatatgttaagcagctaaattttctgaaactgcataagtgaaaatcttacaacaggtttatgaatatatttaagcaacatctttttaacctgcaaaatctgttctaacatgtaattgcagataactttgactttcttctgaatattttatctttccttggcttttcccttgcttccccttttgccaatctcaacacccaagttgaagactttgtttttaaaatggtttgtcctgatgcttttgtctaattaaaacactttcaaaacaggaaaaaaaaaaaaaaaaaa

SEQ ID NO: 1899 - DNA, 987 bp, Homo sapiens
cggagagggggagaacagacaacgggcggcggggagcagcatggagccggcggcggggagcagcatggagccttcggctgactggctggccacggccgcggcccggggtcgggtagaggaggtgcgggcgctgctggaggcgggggcgctgcccaacgcaccgaatagttacggtcggaggccgatccaggtcatgatgatgggcagcgcccgagtggcggagctgctgctgctccacggcgcggagcccaactgcgccgaccccgccactctcacccgacccgtgcacgacgctgcccgggagggcttcctggacacgctggtggtgctgcaccgggccggggcgcggctggacgtgcgcgatgcctggggccgtctgcccgtggacctggctgaggagctgggccatcgcgatgtcgcacggtacctgcgcgcggctgcggggggcaccagaggcagtaaccatgcccgcatagatgccgcggaaggtccctcagacatccccgattgaaagaaccagagaggctctgagaaacctcgggaaacttagatcatcagtcaccgaaggtcctacagggccacaactgcccccgccacaacccaccccgctttcgtagttttcatttagaaaatagagcttttaaaaatgtcctgccttttaacgtagatataagccttcccccactaccgtaaatgtccatttatatcattttttatatattcttataaaaatgtaaaaaagaaaaacaccgcttctgccttttcactgtgttggagttttctggagtgagcactcacgccctaagcgcacattcatgtgggcatttcttgcgagcctcgcagcctccggaagctgtcgacttcatgacaagcattttgtgaactagggaagctcaggggggttactggcttctcttgagtcacactgctagcaaatggcagaaccaaagctcaaataaaaataaaataattttcattcattcactc

SEQ ID NO: 1900 - DNA, 2545 bp, Homo sapiens
atccaatacaggagtgacttggaactccattctatcactatgaagaaaagtggtgttcttttcctcttgggcatcatcttgctggttctgattggagtgcaaggaaccccagtagtgagaaagggtcgctgttcctgcatcagcaccaaccaagggactatccacctacaatccttgaaagaccttaaacaatttgccccaagcccttcctgcgagaaaattgaaatcattgctacactgaagaatggagttcaaacatgtctaaacccagattcagcagatgtgaaggaactgattaaaaagtgggagaaacaggtcagccaaaagaaaaagcaaaagaatgggaaaaaacatcaaaaaaagaaagttctgaaagttcgaaaatctcaacgttctcgtcaaaagaagactacataagagaccacttcaccaataagtattctgtgttaaaaatgttctattttaattataccgctatcattccaaaggaggatggcatataatacaaaggcttattaatttgactagaaaatttaaaacattactctgaaattgtaactaaagttagaaagttgattttaagaatccaaacgttaagaattgttaaaggctatgattgtctttgttcttctaccacccaccagttgaatttcatcatgcttaaggccatgattttagcaatacccatgtctacacagatgttcacccaaccacatcccactcacaacagctgcctggaagagcagccctaggcttccacgtactgcagcctccagagagtatctgaggcacatgtcagcaagtcctaagcctgttagcatgctggtgagccaagcagtttgaaattgagctggacctcaccaagctgctgtggccatcaacctctgtatttgaatcagcctacaggcctcacacacaatgtgtctgagagattcatgctgattgttattgggtatcaccactggagatcaccagtgtgtggctttcagagcctcctttctggctttggaagccatgtgattccatcttgcccgctcaggctgaccactttatttctttttgttcccctttgcttcattcaagtcagctcttctccatcctaccacaatgcagtgcctttcttctctccagtgcacctgtcatatgctctgatttatctgagtcaactcctttctcatcttgtccccaacaccccacagaagtgctttcttctcccaattcatcctcactcagtccagcttagttcaagtcctgcctcttaaataaacctttttggacacacaaattatcttaaaactcctgtttcacttggttcagtaccacatgggtgaacactcaatggttaactaattcttgggtgtttatcctatctctccaaccagattgtcagctccttgagggcaagagccacagtatatttccctgtttcttccacagtgcctaataatactgtggaactaggttttaataattttttaattgatgttgttatgggcaggatggcaaccagaccattgtctcagagcaggtgctggctctttcctggctactccatgttggctagcctctggtaacctcttacttattatcttcaggacactcactacagggaccagggatgatgcaacatccttgtctttttatgacaggatgtttgctcagcttctccaacaataagaagcacgtggtaaaacacttgcggatattctggactgtttttaaaaaatatacagtttaccgaaaatcatataatcttacaatgaaaaggactttatagatcagccagtgaccaaccttttcccaaccatacaaaaattccttttcccgaaggaaaagggctttctcaataagcctcagctttctaagatctaacaagatagccaccgagatccttatcgaaactcattttaggcaaatatgagttttattgtccgtttacttgtttcagagtttgtattgtgattatcaattaccacaccatctcccatgaagaaagggaacggtgaagtactaagcgctagaggaagcagccaagtcggttagtggaagcatgattggtgcccagttagcctctgcaggatgtggaaacctccttccaggggaggttcagtgaattgtgtaggagaggttgtctgtggccagaatttaaacctatactcactttcccaaattgaatcactgctcacactgctgatgatttagagtgctgtccggtggagatcccacccgaacgtcttatctaatcatgaaactccctagttccttcatgtaacttccctgaaaaatctaagtgtttcataaatttgagagtctgtgacccacttaccttgcatctcacaggtagacagtatataactaacaaccaaagactacatattgtcactgacacacacgttataatcatttatcatatatatacatacatgcatacactctcaaagcaaataatttttcacttcaaaacagtattgacttgtataccttgtaatttgaaatattttctttgttaaaatagaatggtatcaataaatagaccattaatcag

SEQ ID NO: 1901 - protein, 149 aa, Homo sapiens
MASSDIQVKELEKRASGQAFELILSPRSKESVPEFPLSPPKKKDLSLEEIQKKLEAAEERRKSHEAEVLKQLAEKREHEKEVLQKAIEENNNFSKMAEEKLTHKMEANKENREAQMAAKLERLREKDKHIEEVRKNKESKDPADETEAD

SEQ ID NO: 1902 - protein, 276 aa, Homo sapiens
MSKPVDHVKRPMNAFMVWSRAQRRKMAQENPKMHNSEISKRLGAEWKLLTESEKRPFIDEAKRLRAMHMKEHPDYKYRPRRKPKTLLKKDKFAFPVPYGLGGVADAEHPALKAGAGLHAGAGGGLVPESLLANPEKAAAAAAAAAARVFFPQSAAAAAAAAAAAAAGSPYSLLDLGSKMAEISSSSSGLPYASSLGYPTAGAGAFHGAAAAAAAAAAAAGGHTHSHPSPGNPGYMIPCNCSAWPSPGLQPPLAYILLPGMGKPQLDPYPAAYAAAL

SEQ ID NO: 1903 - protein, 2209 aa, Homo sapiens
MWNDIELLTNDDTGSGYLSVGSRKEHGTALYQVDLLVKISSEKASLNPKIQACSLSDGFIIVADQSVILLDSICRSLQLHLVFDTEVDVVGLCQEGKFLLVGERSGNLHLIHVTSKQTLLTNAFVQKANDENRRTYQNLVIEKDGSNEGTYYMLLLTYSGFFCITNLQLLKIQQAIENVDFSTAKKLQGQIKSSFISTENYHTLGCLSLVAGDLASEVPVIIGGTGNCAFSKWEPDSSKKGMTVKNLIDAEIIKGAKKFQLIDNLLFVLDTDNVLSLWDIYTLTPVWNWPSLHVEEFLLTTEADSPSSVTWQGITNLKLIALTASANKKMKNLMVYSLPTMEILYSLEVSSVSSLVQTGISTDTIYLLEGVCKNDPKLSEDSVSVLVLRCLTEALPENRLSRLLHKHRFAEAESFAIQFGLDVELVYKVKSNHILEKLALSSVDASEQTEWQQLVDDAKENLHKIQDDEFVVNYCLKAQWITYETTQEMLNYAKTRLLKKEDKTALIYSDGLKEVLRAHAKLTTFYGAFGPEKFSGSSWIEFLNNEDDLKDIFLQLKEGNLVCAQYLWLRHRANFESRFDVKMLESLLNSMSASVSLQKLCPWFKNDVIPFVRRTVPEGQIILAKWLEQAARNLELTDKANWPENGLQLAEIFFTAEKTDELGLASSWHWISLKDYQNTEEVCQLRTLVNNLRELITLHRKYNCKLALSDFEKENTTTIVFRMFDKVLAPELIPSILEKFIRVYMREHDLQEEELLLLYIEDLLNRCSSKSTSLFETAWEAKAMAVIACLSDTDLIFDAVLKIMYAAVVPWSAAVEQLVKQHLEMDHPKVKLLQESYKLMEMKKLLRGYGIREVNLLNKEIMRVVRYILKQDVPSSLEDALKVAQAFMLSDDEIYSLRIIDLIDREQGEDCLLLLKSLPPAEAEKTAERVIIWARLALQEEPDHSKEGKAWRMSVAKTSVDILKILCDIQKDNLQKKDECEEMLKLFKEVASLQENFEVFLSFEDYSNSSLVADLREQHIKAHEVAQAKHKPGSTPEPIAAEVRSPSMESKLHRQALALQMSKQELEAELTLRALKDGNIKTALKKCSDLFKYHCNADTGKLLFLTCQKLCQMLADNVPVTVPVGLNLPSMIHDLASQAATICSPDFLLDALELCKHTLMAVELSRQCQMDDCGILMKASFGTHKDPYEEWSYSDFFSEDGIVLESQMVLPVIYELISSLVPLAESKRYPLESTSLPYCSLNEGDGLVLPVINSISALLQNLQESSQWELALRFVVGSFGTCLQHSVSNFMNATLSEKLFGETTLVKSRHVVMELKEKAVIFIRENATTLLHKVFNCRLVDLDLALGYCTLLPQKDVFENLWKLIDKAWQNYDKILAISLVGSELASLYQEIEMGLKFRELSTDAQWGIRLGKLGISFQPVFRQHFLTKKDLIKALVENIDMDTSLILEYCSTFQLDCDAVLQLFIETLLHNTNAGQGQGDASMDSAKRRHPKLLAKALEMVPLLTSTKDLVISLSGILHKLDPYDYEMIEVVLKVIERADEKITNININQALSILKHLKSYRRISPPVDLEYQYMLEHVITLPSAAQTRLPFHLIFFGTAQNFWKILSTELSEESFPTLLLISKLMKFSLDTLYVSTAKHVFEKKLKPKLLKLTQAKSSTLINKEITKITQTIESCLLSIVNPEWAVAIAISLAQDIPEGSFKISALKFCLYLAERWLQNIPSQDEKREKAEALLKKLHIQYRRSGTEAVLIAHKLNTEEYLRVIGKPAHLIVSLYEHPSINQRIQNSSGTDYPDIHAAAKEIAEVNEINLEKVWDMLLEKWLCPSTKPGEKPSELFELQEDEALRRVQYLLLSRPIDYSSRMLFVFATSTTTTLGMHQLTFAHRTRALQCLFYLADKETIESLFKKPIEEVKSYLRCITFLASFETLNIPITYELFCSSPKEGMIKGLWKNHSHESMAVRLVTELCLEYKIYDLQLWNGLLQKLLGFNMIPYLRKVLKAISSIHSLWQVPYFSKAWQRVIQIPLLSASCPLSPDQLSDCSESLIAVLECPVSGDLDLIGVARQYIQLELPAFALACLMLMPHSEKRHQQIKNFLGSCDPQVILKQLEEHMNTGQLAGFSHQIRSLILNNIINKKEFGILAKTKYFQMLKMHAMNTNNITELVNYLANDLSLDEASVLITEYSKHCGKPVPPDTAPCEILKMFLSGLS

SEQ ID NO: 1904 - protein, 197 aa, Homo sapiens
MQRASRLKRELHMLATEPPPGITCWQDKDQMDDLRAQILGGANTPYEKGVFKLEVIIPERYPFEPPQIRFLTPIYHPNIDSAGRICLDVLKLPPKGAWRPSLNIATVLTSIQLLMSEPNPDDPLMADISSEFKYNKPAFLKNARQWTEKHARQKQKADEEEMLDNLPEAGDSRVHNSTQKRKASQLVGIEKKFHPDV

SEQ ID NO: 1905 - protein, 202 aa, Homo sapiens
MATLIYVDKENGEPGTRVVAKDGLKLGSGPSIKALDGRSQVSTPRFGKTFDAPPALPKATRKALGTVNRATEKSVKTKGPLKQKQPSFSAKKMTEKTVKAKSSVPASDDAYPEIEKFFPFNPLDFESFDLPEEHQIAHLPLSGVPLMILDEERELEKLFQLGPPSPVKMPSPPWESNLLQSPSSILSTLDVELPPVCCDIDI

SEQ ID NO: 1906 - protein, 464 aa, Homo sapiens
METLSFPRYNIAEIVVHIRNKLLTGADGKNLSKSDFLPNPKPEVLYMIYMRALQLVYGVRLEHFYMMPVNIEVMYPHIMEGFLPVSNLFFHLDSFMPICRVNDFEIADILYPKANRTSRFLSGIINFIHFRETCLEKYEEFLLQNKSSVDKIQQLSNAHQEALMKLEKLNSVPVEEQEEFKQLKDDIQELQHLLNQDFRQKTTLLQERYTKMKSDFSEKTKHVNELKLSVVSLKEVQDSLKSKIVDSPEKLKNYKEKMKDTVQKLRSAREEVMEKYDIYRDSVDCLPSCQLEVQLYQKKSQDLADNREKLSSILKESLNLEGQIDSDSSELKKLKTEENSLIRLMTLKKERLATMQFKINKKQEDVKQYKRTMIEDCNKVQEKRDAVCEQVTAINQDIHKIKSGIQQLRDAEKREKLKSQEILVDLKSALEKYHEGIEKTTEECCTRIGGKTAELKRRMFKMPP

SEQ ID NO: 1907 - protein, 168 aa, Homo sapiens
MAEPWGNELASAAARGDLEQLTSLLQNNVNVNAQNGFGRTALQVMKLGNPEIARRLLLRGANPDLKDRTGFAVIHDAARAGFLDTLQTLLEFQADVNIEDNEGNLPLHLAAKEGHLRVVEFLVKHTASNVGHRNHKGDTACDLARLYGRNEVVSLMQANGAGGATNLQ

SEQ ID NO: 1908 - protein, 156 aa, Homo sapiens
MEPAAGSSMEPSADWLATAAARGRVEEVRALLEAGALPNAPNSYGRRPIQVMMMGSARVAELLLLHGAEPNCADPATLTRPVHDAAREGFLDTLVVLHRAGARLDVRDAWGRLPVDLAEELGHRDVARYLRAAAGGTRGSNHARIDAAEGPSDIPD

SEQ ID NO: 1909 - protein, 125 aa, Homo sapiens
MKKSGVLFLLGIILLVLIGVQGTPVVRKGRCSCISTNQGTIHLQSLKDLKQFAPSPSCEKIEIIATLKNGVQTCLNPDSADVKELIKKWEKQVSQKKKQKNGKKHQKKKVLKVRKSQRSRQKKTT

SEQ ID NO: 1910 - DNA, 931 bp, Homo sapiens
caacagtcagaggtcgcgcaggcgctggtaccccgttggtccgcgcgttgctgcgttgtgaggggtgtcagctcagtgcatcccaggcagctcttagtgtggagcagtgaactgtgtgtggttccttctacttggggatcatgcagagagcttcrcgtctgaagagagagctgcacatgttagccacagagccacccccaggcatcacatgttggcaagataaagaccaaatggatgacctgcgagctcaaatattaggtggagccaacacaccttatgagaaaggtgtttttaagctagaagttatcattcctgagaggtacccatttgaacctcctcagatccgatttctcactccaatttatcatccaaacattgattctgctggaaggatttgtctggatgttctcaaattgccaccaaaaggtgcttggagaccatccctcaacatcgcaactgtgttgacctctattcagctgctcatgtcagaacccaaccctgatgacccgctcatggctgacatatcctcagaatttaaatataataagccagccttcctcaagaatgccagacagtggacagagaagcatgcaagacagaaacaaaaggctgatgaggaagagatgcttgataatctaccagaggctggtgactccagagtacacaactcaacacagaaaaggaaggccagtcagctagtaggcatagaaaagaaatttcatcctgatgtttaggggacttgtcctggttcatcttagttaatgtgttctttgccaaggtgatctaagttgcctaccttgaatttttttttaaatatatttgatgacataatttttgtgtagtttatttatcttgtacatatgtattttgaaatcttttaaacctgaaaaataaatagtcatttaatgttgaaaaaaaaaaaaaaaaaaaa

SEQ ID NO: 1911 - DNA, 27 bp, Artificial Sequence
  PCR primer
gctaaaggtgaccccaagaaaccaaag

SEQ ID NO: 1912 - DNA, 37 bp, Artificial Sequence; identical to SEQ ID NO: 1666
  PCR primer

SEQ ID NO: 1913 - protein, 207 aa, Homo sapiens; identical to SEQ ID NO: 1667

SEQ ID NO: 1914 - DNA, 624 bp, Homo sapiens
atgcagcatcaccaccatcaccacgctaaaggtgaccccaagaaaccaaagggcaagatgtccgcttatgccttctttgtgcagacatgcagagaagaacataagaagaaaaacccagaggtccctgtcaattttgcggaattttccaagaagtgctctgagaggtggaagacgatgtccgggaaagagaaatctaaatttgatgaaatggcaaaggcagataaagtgcgctatgatcgggaaatgaaggattatggaccagctaagggaggcaagaagaagaaggatcctaatgctcccaaaaggccaccgtctggattcttcctgttctgttcagaattccgccccaagatcaaatccacaaaccccggcatctctattggagacgtggcaaaaaagctgggtgagatgtggaataatttaaatgacagtgaaaagcagccttacatcactaaggcggcaaagctgaaggagaagtatgagaaggatgttgctgactataagtcgaaaggaaagtttgatggtgcaaagggtccagctaaagttgcccggaaaaaggtggaagaggaagatgaagaagaggaggaggaagaagaggaggaggaggaggaggaggatgaataa

SEQ ID NO: 1915 - DNA, 28 bp, Artificial Sequence
  PCR primer
gtgacgatggaggagctgcgggagatgg

SEQ ID NO: 1916 - DNA, 30 bp, Artificial Sequence
  PCR primer
cgcctaactcgagtcactaacagctgggag

SEQ ID NO: 1917 - protein, 401 aa, Homo sapiens
MQHHHHHHVTMEELREMDCSVLKRLMNRDENGGGAGGSGSHGTLGLPSGGKCLLLDCRPFLAHSAGYILGSVNVRCNTIVRRRAKGSVSLEQILPAEEEVRARLRSGLYSAVIVYDERSPRAESLREDSTVSLVVQALRRNAERTDICLLKGGYERFSSEYPEFCSKTKALAAIPPPVPPSATEPLDLGCSSCGTPLHDQGGPVEILPFLYLGSAYHAARRDMLDALGITALLNVSSDCPNHFEGHYQYKCIPVEDNHKADISSWFMEAIEYIDAVKDCRGRVLVHCQAGISRSATICLAYLMMKKRVRLEEAFEFVKQRRSIISPNFSFMGQLLQFESQVLATSCAAEAASPSGPLRERGKTPATPTSQFVFSFPVSVGVHSAPSSLPYLHSPITTSPSC

SEQ ID NO: 1918 - DNA, 1209 bp, Homo sapiens
atgcagcatcaccaccatcaccacgtgacgatggaggagctgcgggagatggactgcagtgtgctcaaaaggctgatgaaccgggacgagaatggcggcggcgcgggcggcagcggcagccacggcaccctggggctgccgagcggcggcaagtgcctgctgctggactgcagaccgttcctggcgcacagcgcgggctacatcctaggttcggtcaacgtgcgctgtaacaccatcgtgcggcggcgggctaagggctccgtgagcctggagcagatcctgcccgccgaggaggaggtacgcgcccgcttgcgctccggcctctactcggcggtcatcgtctacgacgagcgcagcccgcgcgccgagagcctccgcgaggacagcaccgtgtcgctggtggtgcaggcgctgcgccgcaacgccgagcgcaccgacatctgcctgctcaaaggcggctatgagaggttttcctccgagtacccagaattctgttctaaaaccaaggccctggcagccatcccacccccggttccccccagtgccacagagcccttggacctgggctgcagctcctgtgggaccccactacacgaccaggggggtcctgtggagatccttcccttcctctacctcggcagtgcctaccatgctgcccggagagacatgctggacgccctgggcatcacggctctgttgaatgtctcctcggactgcccaaaccactttgaaggacactatcagtacaagtgcatcccagtggaagataaccacaaggccgacatcagctcctggttcatggaagccatagagtacatcgatgccgtgaaggactgccgtgggcgcgtgctggtgcactgccaggcgggcatctcgcggtcggccaccatctgcctggcctacctgatgatgaagaaacgggtgaggctggaggaggccttcgagttcgttaagcagcgccgcagcatcatctcgcccaacttcagcttcatggggcagctgctgcagttcgagtcccaggtgctggccacgtcctgtgctgcggaggctgctagcccctcgggacccctgcgggagcggggcaagacccccgccacccccacctcgcagttcgtcttcagctttccggtctccgtgggcgtgcactcggcccccagcagcctgccctacctgcacagccccatcaccacctctcccagctgttagtga

SEQ ID NO: 1919 - DNA, 23 bp, Artificial Sequence
  PCR primer
cggtgccacgcccatggaccttc

SEQ ID NO: 1920 - DNA, 35 bp, Artificial Sequence
  PCR primer
ctgagaattcattaaacttgtggttgctcttcacc

SEQ ID NO: 1921 - protein, 167 aa, Homo sapiens [sequence omitted]

SEQ ID NO: 1922 - DNA, 507 bp, Homo sapiens
atgcagcatcaccaccatcaccaccggtgccacgcccatggaccttcttgtctcgtcacggccataactagggaggaaggagggccgaggagtggaggggctcaggcgaagctggggtgctgttgggggtatccgagtcccagaagcacctggaaccccgacagaagattctggactccccagacgggaccaggagagggacggcatgagcgacacacacaaacacagaaccacacagccagtcccaggagcccagtaatggagagccccaaaaagaagaaccagcagctgaaagtcgggatcctacacctgggcagcagacagaagaagatcaggatacagctgagatcccagtgcgcgacatggaaggtgatctgcaagagctgcatcagtcaaacaccggggataaatctggatttgggttccggcgtcaaggtgaagataatacctaaagaggaacactgtaaaatgccagaagcaggtgaagagcaaccacaagtttaatga

SEQ ID NO: 1923 - DNA, 3192 bp, Homo sapiens
cccacgcgtccggcggtcgccgcgggatttggagctgcctagcctcgcggtcgctttggcagcatgtaagcagctgtttgccaagaacccaggtcactgctaagaaagggtgccttcgggagaagagtgtccagaggataccaatgccagatgcatctggagttacactcagcactcgcagtatgagacattgtgtgccagcatctctttccttctggcaaagactgtagctctccaggtaggaggatcctggaagctgtgagcaccaggagccttgccagaggaggatggggccagatatgaactctctaccatgaacatggttctcggcttatgaaggaattttaagtaaaacagttatttaatttccacatattcaagtcaaaagccttctgtgtgaagtgccagtgattacccctccacaggagttatcaggatttttctggcaccaagtttaattcttcttcgtacttctggtagtgacagatctgcagggcagatttatctgttgaatgctcttgggcaggaaaaccatgtaaaacctctggaagcagcatcaggacagcagagcagagcccccgtcctcactgctcacttgcacagaaactccatctggactcggatgcttttactgaagacccatctagcttcaatcatctttagagtccatccattctggagagacctggcgtttgcagttgcctcctgtggccgtgtttttctgtcattctgttcccaggccttctattcaggcggttgaagggtgtggactttggaatggggtttgctgttcttcgggaacttgcttcctttccctggctggtgctgtcaggaaggaccatctgaaggctgcaatttgttcttagggaggcaggtgctggcctggcctggatcttccaccatgttcctgttgctgccttttgatagcctgattgtcaaccttctgggcatctccctgactgtcctcttcaccctccttctcgttttcatcatagtgccagccatttttggagtctcctttggtatccgcaaactctacatgaaaagtctgttaaaaatctttgcgtgggctaccttgagaatggagcgaggagccaaggagaagaaccaccagctttacaagccctacaccaacggaatcattgcaaaggatcccacttcactagaagaagagatcaaagagattcgtcgaagtggtagtagtaaggctctggacaacactccagagttcgagctctctgacattttctacttttgccggaaaggaatggagaccattatggatgatgaggtgacaaagagattctcagcagaagaactggagtcctggaacctgctgagcagaaccaattataacttccagtacatcagccttcggctcacggtcctgtgggggttaggagtgctgattcggtactgctttctgctgccgctcaggatagcactggctttcacagggattagccttctggtggtgggcacaactgtggtgggatacttgccaaatgggaggtttaaggagttcatgagtaaacatgttcacttaatgtgttaccggatctgcgtgcgagcgctgacagccatcatcacctaccatgacagggaaaacagaccaagaaatggtggcatctgtgtggccaatcatacctcaccgatcgatgtgatcatcttggccagcgatggctattatgccatggtgggtcaagtgcacgggggactcatgggtgtgattcagagagccatggtgaaggcctgcccacacgtctggtttgagcgctcggaagtgaaggatcgccacctggtggctaagagactgactgaacatgtgcaagataaaagcaagctgcctatcctcatcttcccagaaggaacctgcatcaataatacatcggtgatgatgttcaaaaagggaagttttgaaattggagccacagtttaccctgttgctatcaagtatgaccctcaatttggcgatgccttctggaacagcagcaaatacgggatggtgacgtacctgctgcgaatgatgaccagctgggccattgtctgcagcgtgtggtacctgcctcccatgactagagaggcagatgaagatgctgtccagtttgcgaatagggtgaaatctgccattgccaggcagggaggacttgtggacctgctgtgggatgggggcctgaagagggagaaggtgaaggacacgttcaaggaggagcagcagaagctgtacagcaagatgatcgtggggaaccacaaggacaggagccgctcctgagcctgcctccagctggctggggccaccgtgcggggtgccaacgggctcagagctggagttgccgccgccgcccccactgctgtgtcctttccagactccagggctccccgggctgctctggatcccaggactccggctttcgccgagccgcagcgggatccctgtgcacccggcgcagctacccttggtggtctaaacggatgctgctgggtgttgcgacccaggacgagatgccttgtttcttttacaataagtcgttggaggaatgccattaaagtgaactccccacctttgcacgctgtgcgggctgagtggttggggagatgtggccatggtcttgtgctagagatggcggtacaagagtctgttatgcaagcccgtgtgccagggatgtgctgggggcggccacccgctctccaggaaaggcacagctgaggcactgtggctggcttcggcctcaacatcgcccccagccttggagctctgcagacatgataggaaggaaactgtcatctgcaggggctttcagcaaaatgaagggttagatttttatgctgctgctgatggggttactaaagggaggggaagaggccaggtgggccgctgactgggccatggggagaacgtgtgttcgtactccaggctaaccctgaactccccatgtgatgcgcgctttgttgaatgtgtgtctcggtttccccatctgtaatatgagtcggggggaatggtggtgattcctacctcacagggctgttgtggggattaaagtgctgcgggtgagtgaaggacacatcacgttcagtgtttcaagtacaggcccacaaaacggggcacggcaggcctgagctcagagctgctgcactgggctttggatttgttcttgtgagtaaataaaactggctggtgaatgaaaaaaaaaa

SEQ ID NO: 1924 - DNA, 2048 bp, Homo sapiens
  misc_feature 787, 1453, 1521, 1727: n = A,T,C or G
gccggaagcgcgcggagaccatgtagtgagaccctcgcgaggtctgagagtcactggagctaccagaagcatcatggggccctggggagagccagagctcctggtgtggcgccccgaggcggtagcttcagagcctccagtgcctgtggggctggaggtgaagttgggggccctggtgctgctgctggtgctcaccctcctctgcagccttggttccatcggtgtgctgcgccggacaggagctaatcatgaaggctcagcttcccgccagaaagccctgagcctagtaagctgtttcgcggggggcgtctttttggccacttgtctcctggacctgctgcctgactacctggctgccatagatgaggccctggcagccttgcacgtgacgctccagttcccactgcaagagttcatcctggccatgggcttcttcctggtcctggtgatggagcagatcacactggcttacaaggagcagtcagggccgtcacctctggaggaaacaagggctctgctgggaacagtgaatggtgggccgcagcattggcatgatgggccaggggtcccacaggcgagtggagccccagcaaccccctcagccttgcgtgcctgtgtactggtgttctccctggccctccactccgtgttcgaggggctggcggtagggctgcagcgagaccgggctcgggccatggagctgtgcctggctttgctgctccacaagggcatcctggctgtcagcctgtccctgcggctgttgcagagccaccttagggcacaggtngtggctggctgtgggatcctgttctcatgcatgacacctctaggcatcgggctgggtgcagctctggcagagtcggcaggacctctgcaccagctggcccagtctgtgctagagggcatggcagctggcacctttctctatatcacctttctggaaatcctgccccaggagctggccagttctgagcaaaggatcctcaaggtcattctgctcctagcaggctttgccctgctcactggcctgctcttcatccaaatctagggggcttcaagagaggggcaggggagattgatgatcaggtgcccctgttctcccttccctcccccagttgtggggaataggaaggaaaggggaagggaaatactgaggaccaaaaagttctctgggagctaaagatagagcctttggggctatctgactaatgagagggaagtgggcagacaagaggctggccccagtcccaaggaacaagagatggtcaagtcgctagagacatatcaggggacattaggattggggaagacacttgactgctagaatcagaggttggacactatacataaggacaggctcacatgggaggctggaggtgggtacccagctgctgtggaacgggtatggacaggtcataaacctagagtcagtgtcctgttggtcctdvgcccnatttcagcaccctgccacttggagtggacccctcctactcttcttagcgcctaccctcatacctatcntccctcctcccatctcctagggactggcgccaaatggtctctccctgccaattttggtatcttctctggcctctccagtcctgcttactcctctatttttaaagtgccaaacaaatccccttcctctttctcaaagcacagtaatgtggcactgagccctacccagcacctcagtgaagggggcctgcttgcctttttttttgttncccggatcctggggtggggcagaaatattttctgggctggggtaggaggaaggttgttagcatctactgctgccgtaccctaggaatatggggacatggacatggtgtcccatgcccagatgataaacactgagctgccaaaacatttttttaaatacacccgaggagcccaagggggaagggcaatgcctacccccagcgttatttttggggagggagggctgtgcatagggacatattctttagaatctattttattaactgacctgttttgggacctgttacccaaataaaagatgtttctagacaaaaaaaaaaaaa

SEQ ID NO: 1925 - protein, 456 aa, Homo sapiens
MFLLLPFDSLIVNLLGISLTVLFTLLLVFIIVPAIFGVSFGIRKLYMKSLLKIFAWATLRMERGAKEKNHQLYKPYTNGIIAKDPTSLEEEIKEIRRSGSSKALDNTPEFELSDIFYFCRKGMETIMDDEVTKRFSAEELESWNLLSRTNYNFQYISLRLTVLWGLGVLIRYCFLLPLRIALAFTGISLLVVGTTVVGYLPNGRFKEFMSKHVHLMCYRICVRALTAIITYHDRENRPRNGGICVANHTSPIDVIILASDGYYAMVGQVHGGLMGVIQRAMVKACPHVWFERSEVKDRHLVAKRLTEHVQDKSKLPILIFPEGTCINNTSVMMFKKGSFEIGATVYPVAIKYDPQFGDAFWNSSKYGMVTYLLRMMTSWAIVCSVWYLPPMTREADEDAVQFANRVKSAIARQGGLVDLLWDGGLKREKVKDTFKEEQQKLYSKMIVGNHKDRSRS

SEQ ID NO: 1926 - protein, 324 aa, Homo sapiens
MGPWGEPELLVWRPEAVASEPPVPVGLEVKLGALVLLLVLTLLCSLGSIGVLRRTGANHEGSASRQKALSLVSCFAGGVFLATCLLDLLPDYLAAIDEALAALHVTLQFPLQEFILAMGFFLVLVMEQITLAYKEQSGPSPLEETRALLGTVNGGPQHWHDGPGVPQASGAPATPSALRACVLVFSLALHSVFEGLAVGLQRDRARAMELCLALLLHKGILAVSLSLRLLQSHLRAQVVAGCGILFSCMTPLGIGLGAALAESAGPLHQLAQSVLEGMAAGTFLYITFLEILPQELASSEQRILKVILLLAGFALLTGLLFIQI

SEQ ID NO: 1927 - protein, 15 aa, Homo sapiens
GPRSGGAQAKLGCCW

SEQ ID NO: 1928 - protein, 20 aa, Homo sapiens
KVICKSCISQTPGINLDLGS

SEQ ID NO: 1929 - protein, 20 aa, Homo sapiens
IIPKEEHCKMPEAGEEQPQV

SEQ ID NO: 1930 - protein, 24 aa, Homo sapiens
LSIPHPYAYPDYYPYAWFGVNPGM

SEQ ID NO: 1931 - DNA, 1526 bp, Homo sapiens
actggaacatttttacatgatgccagtgaactctgaagtcatgtatccacatttaatggaaggcttcttaccattcagcaatttagttactcatctggactcatttttgcctatctgccgggtgaatgactttgagactgctgatattctatgtccaaaagcaaaacggacaagtcggtttttaagtggcattatcaactttattcacttcagagaagcatgccgtgaaacgtatatggaatttctttggcaatataaatcctctgcggacaaaatgcaacagttaaacgccgcacaccaggaggcattaatgaaactggagagacttgattctgttccagttgaagagcaagaagagttcaagcagctttcagatggaattcaggagctacaacaatcactaaatcaggattttcatcaaaaaacgatagtgctgcaagagggaaattcccaaaagaagtcaaatatttcagagaaaaccaagcgtttgaatgaactaaaattgttggtggtttctttgaaagaaatacaagagagtttgaaaacaaaaattgtggattctccagagaagttaaagaattataaagaaaaaatgaaagatacggtccagaagcttaaaaatgccagacaagaagtggtggagaaatatgaaatctatggagactcagttgactgcctgccttcatgtcagttggaagtgcagttatatcaaaagaaaatacaggacctttcagataatagggaaaaattagccagtatcttaaaggagagcctgaacttggaggaccaaattgagagtgatgagtcagaactgaagaaattgaagactgaagaaaattcgttcaaaagactgatgattgtgaagaaggaaaaacttgccacagcacaattcaaaataaataagaagcatgaagatgttaagcaatacaaacgcacagtaattgaggattgcaataaagttcaagaaaaaagaggtgctgtctatgaacgagtaaccacaattaatcaagaaatccaaaaaattaaacttggaattcaacaactaaaagatgctgctgaaagggagaaactgaagtcccaggaaatatttctaaacttgaaaactgctttggagaaataccacgacggtattgaaaaggcagcagaggactcctatgctaagatagatgagaagacagctgaactgaagaggaagatgttcaaaatgtcaacctgattaacaaaattacatgtctttttgtaaatggcttgccatcttttaattttctatttagaaagaaaagttgaagcgaatggaagtatcagaagtaccaaataatgttggcttcatcagtttttatacactctcataagtagttaataagatgaatttaatgtaggcttttattaatttataattaaaataacttgtgcagctattcatgtctctactctgccccttgttgtaaatagtttgagtaaaacaaaactagttacctttgaaatatatatatttttttctgttaaaaaaaaaaaaaaaaaaaaaa

SEQ ID NO: 1932 - protein, 404 aa, Homo sapiens
LEHFYMMPVNSEVMYPHLMEGFLPFSNLVTHLDSFLPICRVNDFETADILCPKAKRTSRFLSGIINFIHFREACRETYMEFLWQYKSSADKMQQLNAAHQEALMKLERLDSVPVEEQEEFKQLSDGIQELQQSLNQDFHQKTIVLQEGNSQKKSNISEKTKRLNELKLLVVSLKEIQESLKTKIVDSPEKLKNYKEKMKDTVQKLKNARQEVVEKYEIYGDSVDCLPSCQLEVQLYQKKIQDLSDNREKLASILKESLNLEDQIESDESELKKLKTEENSFKRLMIVKKEKLATAQFKINKKHEDVKQYKRTVIEDCNKVQEKRGAVYERVTTINQEIQKIKLGIQQLKDAAEREKLKSQEIFLNLKTALEKYHDGIEKAAEDSYAKIDEKTAELKRKMFKMST

SEQ ID NO: 1933 - DNA, 1836 bp, Homo sapiens
ggcacgagggcaagtttgaaaagtgatgacggttgacgtttgctgatttttgactttgcttgtagctgctccccgaactcgccgtcttcctgtcggcggccggcactgtagattaacaggaaacttccaagatggaaactttgtctttccccagatataatgtagctgagattgtgattcatattcgcaataagatcttaacaggagctgatggtaaaaacctcaccaagaatgatctttatccaaatccaaagcctgaagtcttgcacatgatctacatgagagccttacaaatagtatatggaattcgactggaacatttttacatgatgccagtgaactctgaagtcatgtatccacatttaatggaaggcttcttaccattcagcaatttagttactcatctggactcatttttgcctatctgccgggtgaatgactttgagactgctgatattctatgtccaaaagcaaaacggacaagtcggtttttaagtggcattatcaactttattcacttcagagaagcatgccgtgaaacgtatatggaatttctttggcaatataaatcctctgcggacaaaatgcaacagttaaacgccgcacaccaggaggcattaatgaaactggagagacttgattctgttccagttgaagagcaagaagagttcaagcagctttcagatggtattcaggagctacaacaatcactaaatcaggattttcatcaaaaaacgatagtgctgcaagagggaaattcccaaaagaagtcaaatatttcagagaaaaccaagcgtttgaatgaactaaaattgttggtggtttctttgaaagaaatacaagagagtttgaaaacaaaaattgtggattctccagagaagttaaagaattataaagaaaaaatgaaagatacggtccagaagcttaaaaatgccagacaagaagtggtggagaaatatgaaatctatggagactcagttgactgcctgccttcatgtcagttggaagtgcagttatatcaaaagaaaatacaggacctttcagataatagggaaaaattagccagtatcttaaaggagagcctgaacttggaggaccaaattgagagtgatgagtcagaactgaagaaattgaagactgaagaaaattcgttcaaaagactgatgattgtgaagaaggaaaaacttgccacagcacaattcaaaataaataagaagcatgaagatgttaagcaatacaaacgcacagtaattgaggattgcaataaagttcaagaaaaaagaggtgctgtctatgaacgagtaaccacaattaatcaagaaatccaaaaaattaaacttggaattcaacaactaaaagatgctgctgaaagggagaaactgaagtcccaggaaatatttctaaacttgaaaactgctttggagaaataccacgacggtattgaaaaggcagcagaggactcctatgctaagatagatgagaagacagctgaactgaagaggaagatgttcaaaatgtcaacctgattaacaaaattacatgtctttttgtaaatggcttgccatcttttaattttctatttagaaagaaaagttgaagcgaatggaagtatcagaagtaccaaataatgttggcttcatcagtttttatacactctcataagtagttaataagatgaatttaatgtaggcttttattaatttataattaaaataacttgtgcagctattcatgtctctactctgccccttgttgtaaatagtttgagtaaaacaaaactagttacctttgaaatatatatatttttttctgttaaaaaaaaaaaaaaaaaaaaaa

SEQ ID NO: 1934 - protein, 464 aa, Homo spaiens
METLSFPRYNVAEIVIHIRNKILTGADGKNLTKNDLYPNPKPEVLHMIYMRALQIVYGIRLEHFYMMPVNSEVMYPHLMEGFLPFSNLVTHLDSFLPICRVNDFETADILCPKAKRTSRFLSGIINFIHFREACRETYMEFLWQYKSSADKMQQLNAAHQEALMKLERLDSVPVEEQEEFKQLSDGIQELQQSLNQDFHQKTIVLQEGNSQKKSNISEKTKRLNELKLLVVSLKEIQESLKTKIVDSPEKLKNYKEKMKDTVQKLKNARQEVVEKYEIYGDSVDCLPSCQLEVQLYQKKIQDLSDNREKLASILKESLNLEDQIESDESELKKLKTEENSFKRLMIVKKEKLATAQFKINKKHEDVKQYKRTVIEDCNKVQEKRGAVYERVTTINQEIQKIKLGIQQLKDAAEREKLKSQEIFLNLKTALEKYHDGIEKAAEDSYAKIDEKTAELKRKMFKMST

SEQ ID NO: 1935 - DNA, 26 bp, Artificial Sequence
  PCR primer
ctatgttggcatgcggtgccacgccc

SEQ ID NO: 1936 - DNA, 32 bp, Artificial Sequence
  PCR primer
cacgcctaagatcttcattaaacttgtggttg

SEQ ID NO: 1937 - protein, 159 aa, Homo sapiens
RCHAHGPSCLVTAITREEGGPRSGGAQAKLGCCWGYPSPRSTWNPDRRFWTPQTGPGEGRHERHTQTQNHTASPRSPVMESPKKKNQQLKVGILHLGSRQKKIRIQLRSQCATWKVICKSCISQTPGINLDLGSGVKVKIIPKEEHCKMPEAGEEQPQV

SEQ ID NO: 1938 - DNA, 486 bp, Homo sapiens
atgcggtgccacgcccatggaccttcttgtctcgtcacggccataactagggaggaaggagggccgaggagtggaggggctcaggcgaagctggggtgctgttgggggtatccgagtcccagaagcacctggaaccccgacagaagattctggactccccagacgggaccaggagagggacggcatgagcgacacacacaaacacagaaccacacagccagtcccaggagcccagtaatggagagccccaaaaagaagaaccagcagctgaaagtcgggatcctacacctgggcagcagacagaagaagatcaggatacagctgagatcccagtgcgcgacatggaaggtgatctgcaagagctgcatcagtcaaacaccggggataaatctggatttgggttccggcgtcaaggtgaagataatacctaaagaggaacactgtaaaatgccagaagcaggtgaagagcaaccacaagtttaatga

SEQ ID NO: 1939 - DNA, 28 bp, Artificial Sequence
  PCR primer
ctatgttgcatatatgcggtgccacgcc

SEQ ID NO: 1940 - protein, 160 aa, Homo sapiens; identical to SEQ ID NO: 809

SEQ ID NO: 1941 - DNA, 486 bp, Homo sapiens; identical to SEQ ID NO: 1938

SEQ ID NO: 1942 - protein, 19 aa, Homo sapiens
LGCCWGYPSPRSTWNDRPF

SEQ ID NO: 1943 - protein, 20 aa, Homo sapiens
CSLGVFPSAPSPVWGTRRSC

SEQ ID NO: 1944 - protein, 20 aa, Homo sapiens
ILSPLLRHGGHTQTQNHTAS

SEQ ID NO: 1945 - protein, 20 aa, Homo sapiens
MRCHAHGPSCLVTAITREEG

SEQ ID NO: 1946 - protein, 20 aa, Homo sapiens
HGPSCLVTAITREEGGPRSG

SEQ ID NO: 1947 - protein, 20 aa, Homo sapiens
LVTAITREEGGPRSGGAQAK

SEQ ID NO: 1948 - protein, 20 aa, Homo sapiens
TREEGGPRSGGAQAKLGCCW

SEQ ID NO: 1949 - protein, 20 aa, Homo sapiens
GPRSGGAQAKLGCCWGYPSP

SEQ ID NO: 1950 - protein, 20 aa, Homo sapiens
GAQAKLGCCWGYPSPRSTWN

SEQ ID NO: 1951 - protein, 20 aa, Homo sapiens
LGCCWGYPSPRSTWNPDRRF

SEQ ID NO: 1952 - protein, 20 aa, Homo sapiens
GYPSPRSTWNPDRRFWTPQT

SEQ ID NO: 1953 - protein, 20 aa, Homo sapiens
RSTWNPDRRFWTPQTGPGEG

SEQ ID NO: 1954 - protein, 20 aa, Homo sapiens
PDRRFWTPQTGPGEGRHERH

SEQ ID NO: 1955 - protein, 20 aa, Homo sapiens
WTPQTGPGEGRHERHTQTQN

SEQ ID NO: 1956 - protein, 20 aa, Homo sapiens
GPGEGRHERHTQTQNHTASP

SEQ ID NO: 1957 - protein, 20 aa, Homo sapiens
RHERHTQTQNHTASPRSPVM

SEQ ID NO: 1958 - protein, 20 aa, Homo sapiens
TQTQNHTASPRSPVMESPKK

SEQ ID NO: 1959 - protein, 20 aa, Homo sapiens
HTASPRSPVMESPKKKNQQL

SEQ ID NO: 1960 - protein, 20 aa, Homo sapiens
RSPVMESPKKKNQQLKVGIL

SEQ ID NO: 1961 - protein, 20 aa, Homo sapiens
ESPKKKNQQLKVGILHLGSR

SEQ ID NO: 1962 - protein, 20 aa, Homo sapiens
KNQQLKVGILHLGSRQKKIR

SEQ ID NO: 1963 - protein, 20 aa, Homo sapiens
KVGILHLGSRQKKIRIQLRS

SEQ ID NO: 1964 - protein, 20 aa, Homo sapiens
HLGSRQKKIRIQLRSQCATW

SEQ ID NO: 1965 - protein, 21 aa, Homo sapiens
RQKKIRIQLRSQCATWKVICK

SEQ ID NO: 1966 - protein, 20 aa, Homo sapiens
IQLRSQCATWKVICKSCISQ

SEQ ID NO: 1967 - protein, 21 aa, Homo sapiens
SQCATWKVICKSCISQTPGIN

SEQ ID NO: 1968 - protein, 20 aa, Homo sapiens
KVICKSCISQTPGINLDLGS

SEQ ID NO: 1969 - protein, 20 aa, Homo sapiens
SCISQTPGINLDLGSGVKVK

SEQ ID NO: 1970 - protein, 20 aa, Homo sapiens
TPGINLDLGSGVKVKIIPKE

SEQ ID NO: 1971 - protein, 20 aa, Homo sapiens
LDLGSGVKVKIIPKEEHCKM

SEQ ID NO: 1972 - protein, 20 aa, Homo sapiens
GVKVKIIPKEEHCKMPEAGE

SEQ ID NO: 1973 - protein, 20 aa, Homo sapiens
IIPKEEHCKMPEAGEEQPQV

SEQ ID NO: 1974 - DNA, 60 bp, Homo sapiens
atgcggtgccacgcccatggaccttcttgtctcgtcacggccataactagggaggaagga

SEQ ID NO: 1975 - DNA, 60 bp, Homo sapiens
catggaccttcttgtctcgtcacggccataactagggaggaaggagggccgaggagtgga

SEQ ID NO: 1976 - DNA, 60 bp, Homo sapiens
ctcgtcacggccataactagggaggaaggagggccgaggagtggaggggctcaggcgaag

SEQ ID NO: 1977 - DNA, 60 bp, Homo sapiens
actagggaggaaggagggccgaggagtggaggggctcaggcgaagctggggtgctgttgg

SEQ ID NO: 1978 - DNA, 60 bp, Homo sapiens
gggccgaggagtggaggggctcaggcgaagctggggtgctgttgggggtatccgagtccc

SEQ ID NO: 1979 - DNA, 60 bp, Homo sapiens
ggggctcaggcgaagctggggtgctgttgggggtatccgagtcccagaagcacctggaac

SEQ ID NO: 1980 - DNA, 60 bp, Homo sapiens
ctggggtgctgttgggggtatccgagtcccagaagcacctggaaccccgacagaagattc

SEQ ID NO: 1981 - DNA, 60 bp, Homo sapiens
gggtatccgagtcccagaagcacctggaaccccgacagaagattctggactccccagacg

SEQ ID NO: 1982 - DNA, 60 bp, Homo sapiens
agaagcacctggaaccccgacagaagattctggactccccagacgggaccaggagaggga

SEQ ID NO: 1983 - DNA, 60 bp, Homo sapiens
cccgacagaagattctggactccccagacgggaccaggagagggacggcatgagcgacac

SEQ ID NO: 1984 - DNA, 60 bp, Homo sapiens
tggactccccagacgggaccaggagagggacggcatgagcgacacacacaaacacagaac

SEQ ID NO: 1985 - DNA, 60 bp, Homo sapiens
ggaccaggagagggacggcatgagcgacacacacaaacacagaaccacacagccagtccc

SEQ ID NO: 1986 - DNA, 61 bp, Homo sapiens
cggcatgagcgacacaacacaaacacagaaccacacagccagtcccaggagcccagtaatg

SEQ ID NO: 1987 - DNA, 60 bp, Homo sapiens
acacaaacacagaaccacacagccagtcccaggagcccagtaatggagagccccaaaaag

SEQ ID NO: 1988 - DNA, 60 bp, Homo sapiens
cacacagccagtcccaggagcccagtaatggagagccccaaaaagaagaaccagcagctg

SEQ ID NO: 1989 - DNA, 60 bp, Homo sapiens
aggagcccagtaatggagagccccaaaaagaagaaccagcagctgaaagtcgggatccta

SEQ ID NO: 1990 - DNA, 60 bp, Homo sapiens
gagagccccaaaaagaagaaccagcagctgaaagtcgggatcctacacctgggcagcaga

SEQ ID NO: 1991 - DNA, 60 bp, Homo sapiens
aagaaccagcagctgaaagtcgggatcctacacctgggcagcagacagaagaagatcagg

SEQ ID NO: 1992 - DNA, 60 bp, Homo sapiens
aaagtcgggatcctacacctgggcagcagacagaagaagatcaggatacagctgagatcc

SEQ ID NO: 1993 - DNA, 60 bp, Homo sapiens
cacctgggcagcagacagaagaagatcaggatacagctgagatcccagtgcgcgacatgg

SEQ ID NO: 1994 - DNA, 63 bp, Homo sapiens
agacagaagaagatcaggatacagctgagatcccagtgcgcgacatggaaggtgatctgcaag

SEQ ID NO: 1995 - DNA, 60 bp, Homo sapiens
atacagctgagatcccagtgcgcgacatggaaggtgatctgcaagagctgcatcagtcaa

SEQ ID NO: 1996 - DNA, 63 bp, Homo sapiens
tcccagtgcgcgacatggaaggtgatctgcaagagctgcatcagtcaaacaccggggataaat

SEQ ID NO: 1997 - DNA, 60 bp, Homo sapiens
aaggtgatctgcaagagctgcatcagtcaaacaccggggataaatctggatttgggttcc

SEQ ID NO: 1998 - DNA, 60 bp, Homo sapiens
agctgcatcagtcaaacaccggggataaatctggatttgggttccggcgtcaaggtgaag

SEQ ID NO: 1999 - DNA, 60 bp, Homo sapiens
acaccggggataaatctggatttgggttccggcgtcaaggtgaagataatacctaaagag

SEQ ID NO: 2000 - DNA, 60 bp, Homo sapiens
ctggatttgggttccggcgtcaaggtgaagataatacctaaagaggaacactgtaaaatg

SEQ ID NO: 2001 - DNA, 60 bp, Homo sapiens
ggcgtcaaggtgaagataatacctaaagaggaacactgtaaaatgccagaagcaggtgaa

SEQ ID NO: 2002 - DNA, 60 bp, Homo sapiens
ataatacctaaagaggaacactgtaaaatgccagaagcaggtgaagagcaaccacaagtt

1. An isolated polynucleotide comprising a sequence selected from the group consisting of:
(a) a sequence provided in SEQ ID NOs: 1931, 1938, 1941 and 1974-2002;
(b) complement of the sequence provided in SEQ ID NOs: 1931, 1938, 1941 and 1974-2002;
(c) sequences consisting of at least 20 contiguous residues of a sequence provided in SEQ ID NOs: 1931, 1938, 1941 and 1974-2002;
(d) sequences that hybridize to a sequence provided in SEQ ID NOs: 1931, 1938, 1941 and 1974-2002, under highly stringent conditions;
(e) sequences having at least 75% identity to a sequence of SEQ ID NOs: 1931, 1938, 1941 and 1974-2002;
(f) sequences having at least 90% identity to a sequence of SEQ ID NOs: 1931, 1938, 1941 and 1974-2002; and
(g) degenerate variants of a sequence provided in SEQ ID NOs: 1931, 1938, 1941 and 1974-2002:

2. An isolated polypeptide comprising an amino acid sequence selected from the group consisting of:
(a) SEQ ID NOs: 1927-1930, 1932, 1934, 1937, 1940 and 1942-1973;
(b) sequences having at least 70% identity to the amino acid sequence as provided in SEQ ID NOs: 1927-1930, 1932, 1934, 1937, 1940 and 1942-1973;
(c) sequences having at least 90% identity to the amino acid sequence as provided in SEQ ID NOs: 1927-1930, 1932, 1934, 1937, 1940 and 1942-1973;
(d) sequences encoded by a polynucleotide of claim 1;
(e) sequences having at least 70% identity to a sequence encoded by a polynucleotide of claim 1; and
(f) sequences having at least 90% identity to a sequence encoded by a polynucleotide of claim 1.

3. An expression vector comprising a polynucleotide of claim 1 or a polynucleotide which encodes a polypeptide of claim 2 operably linked to an expression control sequence.

4. A host cell transformed or transfected with an expression vector according to claim 3.

5. An isolated antibody, or antigen-binding fragment thereof, that specifically binds to a polypeptide selected from the group consisting:
(a) a polypeptide according to claim 2; and
(b) a polypeptide having an amino acid sequence that is encoded by a polynucleotide sequence provided in SEQ ID NOs: 1948-1951, 1959, 1962-1968 and 1971 or a complement thereof.

6. An isolated antibody or antigent-binding fragment thereof according to claim 5, wherein the polypeptide is provided in SEQ ID NOs: 1927-1929 and 1942-1973.

7. A method for detecting the presence of a cancer in a patient, comprising the steps of:
(a) obtaining a biological sample from the patient;
(b) contacting the biological sample with a binding agent that binds to a polypeptide selected from the group consisting of:
(i) a polypeptide of claim 2,
(ii) a polypeptide having an amino acid sequence provided in SEQ ID NO: 1934,
(iii) a polypeptide having at least 90% identity to an amino acid sequence provided in SEQ ID NO: 1934,
(iv) a polypeptide having at least 95% identity to an amino acid sequence provided in SEQ ID NOs: 1934,
(v) a polypeptide encoded by a polynucleotide provided in SEQ ID NO: 1933, and
(vi) a polypeptide encoded by a polynucleotide having at least 90% identity to a sequence provided in SEQ ID NO: 1933;
(c) detecting in the sample an amount of polypeptide that binds to the binding agent; and
(d) comparing the amount of polypeptide to a predetermined cut-off value and therefrom determining the presence of a cancer in the patient.

8. A fusion protein comprising at least one polypeptide selected from the group consisting of:
(i) a polypeptide of claim 2,
(ii) a polypeptide having an amino acid sequence provided in SEQ ID NO: 1934,
(iii) a polypeptide having at least 90% identity to an amino acid sequence provided in SEQ ID NO: 1934,
(iv) a polypeptide having at least 95% identity to an amino acid sequence provided in SEQ ID NO: 1934,
(v) a polypeptide encoded by a polynucleotide provided in SEQ ID NO: 1933, and
(vi) a polypeptide encoded by a polynucleotide having at least 90% identity to a sequence provided in SEQ ID NO: 1933.

9. A fusion protein according to claim 8, wherein the at least one polypeptide is provided in:
(a) SEQ ID NOs: 1937 and 1940; and
(b) a polypeptide encoded by a polynucleotide provided in SEQ ID NOs: 1938 and 1941.

10. An oligonucleotide that hybridizes to at least one sequence selected from the group consisting of:
(a) a sequence set forth in claim 1; and
(b) a sequence provided in SEQ ID NO: 1933,
under highly stringent conditions.

11. A method for stimulating and/or expanding T cells specific for a tumor protein, comprising contacting T cells with at least one component selected from the group consisting of:
(a) polypeptides according to claim 2;
(b) a polypeptide having an amino acid sequence provided in SEQ ID NO: 1934:
(c) a polypeptide having an amino acid sequence at least 90% identity to SEQ ID NO: 1934;
(d) a polypeptide having an amino acid sequence at least 95% identity to SEQ ID NO: 1934;
(e) a polynucleotide according to claim 1;
(f) a polynucleotide which encodes a polypeptide having an amino acid sequence as provided in (b), (c) or (d);
(g) a polynucleotide having a sequence provided in SEQ ID NO: 1933;
(h) complement of the sequence provided in SEQ ID NO: 1933;
(i) sequences that hybridize to a sequence provided in SEQ ID NO: 1933, under highly stringent conditions;
(j) sequences having at least 90% identity to a sequence of SEQ ID NO: 1933;
(k) sequences having at least 95% identity to a sequence of SEQ ID NO: 1933;
(l) degenerate variants of a sequence provided in SEQ ID NO: 1933; and
(m) antigen-presenting cells that express a polypeptide according to (a), (b), (c) or (d),
under conditions and for a time sufficient to permit the stimulation and/or expansion of T cells.

12. An isolated T cell population, comprising T cells prepared according to the method of claim 11.

13. A composition comprising a first component selected from the group consisting of physiologically acceptable carriers and immunostimulants, and a second component selected from the group consisting of:
(a) polypeptides according to claim 2;
(b) a polypeptide having an amino acid sequence provided in SEQ ID NO: 1934;
(c) a polypeptide having an amino acid sequence with at least 90% identity to SEQ ID NO: 1934;
(d) a polypeptide having an amino acid sequence with at least 95% identity to SEQ ID NO: 1934;
(e) a polynucleotide according to claim 1;
(f) a polynucleotide which encodes a polypeptide having an amino acid sequence as provided in (b), (c) or (d);
(g) a polynucleotide having a sequence provided in SEQ ID NO: 1933;
(h) complement of the sequence provided in SEQ ID NO: 1933;
(i) sequences that hybridize to a sequence provided in SEQ ID NO: 1933, under highly stringent conditions;
(j) sequences having at least 90% identity to a sequence of SEQ ID NO: 1933;
(k) sequences having at least 95% identity to a sequence of SEQ ID NO: 1933;
(l) degenerate variants of a sequence provided in SEQ ID NO: 1933;
(m) antibodies according to claim 5;
(n) fusion proteins according to claim 8;
(o) T cell populations according to claim 12; and
(p) antigen presenting cells that express a polypeptide according to (a), (b), (c) or (d).

14. A method for stimulating an immune response in a patient, comprising administering to the patient a composition of claim 13.

15. A method for the treatment of a lung cancer in a patient, comprising administering to the patient a composition of claim 13.

16. A method for determining the presence of a cancer in a patient, comprising the steps of:
(a) obtaining a biological sample from the patient;
(b) contacting the biological sample with an oligonucleotide according to claim 10;
(c) detecting in the sample an amount of a polynucleotide that hybridizes to the oligonucleotide; and
(d) compare the amount of polynucleotide that hybridizes to the oligonucleotide to a predetermined cut-off value, and therefrom determining the presence of the cancer in the patient.

17. A diagnostic kit comprising at least one oligonucleotide according to claim 10.

18. A diagnostic kit comprising at least one antibody according to claim 5 and a detection reagent, wherein the detection reagent comprises a reporter group.

19. A method for inhibiting the development of a lung cancer in a patient, comprising the steps of:
(a) incubating CD4+ and/or CD8+ T cells isolated from a patient with at least one component selected from the group consisting of:
(i) polypeptides according to claim 2;
(ii) a polypeptide having an amino acid sequence provided in SEQ ID NO: 1934,
(iii) a polypeptide having an amino acid sequence with at least 90% identity to SEQ ID NO: 1934,
(iv) a polypeptide having an amino acid sequence with at least 95% identity to SEQ ID NO: 1934,
(v) polynucleotides according to claim 1,
(vi) a polynucleotide which encodes a polypeptide having an amino acid sequence as provided in (i), (ii), (iii) or (iv),
(vii) a polynucleotide having a sequence provided in SEQ ID NO: 1933,
(viii) complement of the sequence provided in SEQ ID NO: 1933,
(ix) sequences that hybridize to a sequence provided in SEQ ID NO: 1933, under highly stringent conditions,
(x) sequences having at least 90% identity to a sequence of SEQ ID NO: 1933,
(xi) sequences having at least 95% identity to a sequence of SEQ ID NO: 1933,
(xii) degenerate variants of a sequence provided in SEQ ID NO: 1933, and
(xiii) antigen presenting cells that express a polypeptide according to (i), (ii), (iii) or (iv),
such that T cells proliferate;
(b) administering to the patient an effective amount of the proliferated T cells; and thereby inhibiting the development of a cancer in the patient.
